(19) United States
(12) Patent Application Publication
(10) Pub. No.: US 2024/0024476 A1
(43) Pub. Date: Jan. 25, 2024

(54) CAR Cells and Polyspecific Binding Molecules for Treating Solid Tumor

(71) Applicants: Innovative Cellular Therapeutics Holdings, Ltd., George Town (KY); Innovative Cellular Therapeutics, Inc., Rockville, MD (US)

(72) Inventors: Chengfei Pu, Shanghai (CN); Zhiyuan Cao, Shanghai (CN); Xiaogang Shen, Shanghai (CN); Wensheng Wang, Shanghai (CN); Beibei Jia, Shanghai (CN); Dongqi Chen, Shanghai (CN); Xiaoqiang Xu, Shanghai (CN); Xudong Tang, Shanghai (CN); Wei Ding, Shanghai (CN); Xianyang Jiang, Shanghai (CN); Yuzhe Peng, Shanghai (CN); Guiting Han, Shanghai (CN); Le Tian, Rockville, MD (US); Zhao Wu, Shanghai (CN); Lei Xiao, Rockville, MD (US)

(73) Assignees: Innovative Cellular Therapeutics Holdings, Ltd., George Town (KY); Innovative Cellular Therapeutics, Inc., Rockville, MD (US)

(21) Appl. No.: 18/260,376

(22) PCT Filed: Jan. 6, 2022
(86) PCT No.: PCT/US2022/070076

§ 371 Date: Jul. 5, 2023

Related U.S. Application Data
(60) Provisional application No. 63/283,074, filed on Nov. 24, 2021.
(60) Provisional application No. 63/253,785, filed on Oct. 8, 2021.
(60) Provisional application No. 63/214,538, filed on Jun. 24, 2021.
(60) Provisional application No. 63/195,369, filed on Jun. 1, 2021.
(60) Provisional application No. 63/186,411, filed on May 10, 2021.
(60) Provisional application No. 63/174,732, filed on Apr. 14, 2021.
(60) Provisional application No. 63/134,750, filed on Jan. 7, 2021.

(51) Int. Cl. A61K 39/00; C07K 14/725; C12N 5/0783; C07K 16/30; C07K 16/28; C07K 16/18; C07K 16/40; A61P 35/00

(52) U.S. Cl. CPC A61K 39/4631; C07K 14/7051; C12N 5/0636; C07K 16/3023; C07K 16/303; C07K 16/2875; C07K 16/2803; C07K 16/28; C07K 16/2851; C07K 16/18; C07K 16/40; A61P 35/00; A61K 39/4611; A61K 39/4644; A61K 39/464474; A61K 39/464417; A61K 39/464402; A61K 39/464458; A61K 39/464411; C07K 2319/03; C07K 2319/33; C07K 2317/622; A61K 2239/13; C07K 2317/31

(57) ABSTRACT

The compositions and methods described herein are directed to treating solid tumor using CAR T therapy. For example, the compositions include CAR T cells comprising an extracellular domain that binds FCR1, MSLN, GPC-3, ALPP, CD70, CLDN6, ROR1, CD205, ACPP, ADAM12, or CLDN18.2.

### CROSS REFERENCE TO RELATED APPLICATIONS

[0001] This application is claims the benefit of U.S. Provisional Application No. 63/283,074, filed Nov. 24, 2021; U.S. Provisional Application No. 63/253,785, filed Oct. 8, 2021; U.S. Provisional Application No. 63/214,538, filed Jun. 24, 2021; U.S. Provisional Application No. 63/195,369, filed Jun. 1, 2021; U.S. Provisional Application No. 63/186,411, filed May 10, 2021; U.S. Provisional Application No. 63/174,732, filed Apr. 14, 2021; and U.S. Provisional Application No. 63/134,750, filed Jan. 7, 2021; all of which are incorporated herein by reference in their entirety.

### SEQUENCE LISTING INFORMATION

[0002] A computer readable textfile, entitled “I071-0087PCT_ST25.txt,” created on or about Dec. 16, 2021 with a file size of about 1.10 MB, contains the sequence listing for this application and is hereby incorporated by reference in its entirety.

### TECHNICAL FIELD

[0003] The present disclosure relates to modified cells and uses, in particular to compositions and methods for treating cancer using Chimeric Antigen Receptor (CAR) cells.

### BACKGROUND

[0004] Most existing cancer treatment programs include surgery, radiotherapy, and chemotherapy, targeted therapy and immunotherapy. The drawbacks of the existing programs include poor treatment of advanced patients, side effects, patients with poor quality of life. For example, treatment of renal cancer includes resection, targeted therapy (anti-VEGF and mTOR inhibitor, etc.) and immunotherapy (IL-2, PD1 antibody, etc.). Treatment of pancreatic cancer includes surgical resection, radiotherapy, and chemotherapy. Treatment of urothelial carcinoma includes surgical resection, chemoradiation, targeted therapy, and immunotherapy. Treatment of breast cancer includes surgical resection, chemoradiation, targeted therapy, and immunotherapy. Treatment of ovarian cancer includes surgical resection, radiotherapy, chemotherapy, and targeted therapy. Treatment of prostate cancer includes surgical resection, chemoradiation, targeted therapy, and Immunotherapy. Treatment of esophageal cancer includes surgical resection, radiotherapy, and chemotherapy. Treatment of colorectal cancer includes surgical resection, radiotherapy, chemotherapy, and targeted therapy. Treatment of endometrial cancer includes surgical resection, radiotherapy, chemotherapy, and targeted therapy. Accordingly, there is a need to develop improved methods for treatment of cancer.

### SUMMARY

[0005] Embodiments relate to the discovery that some antigens have relatively low expression on tumor cells, as compared to their expression on normal tissues. Further, while expressed in normal tissues, these antigens are specifically expressed in a certain tissue (e.g., a group of cells or an organ), and the killing of normal cells of the tissue may not cause a life-threatening event (e.g., complications) to the subject. Examples of the nonessential tissues include organs such as prostate, breast, or melanocyte. Accordingly, the embodiments of the present disclosure relate to a chimeric antigen receptor (CAR) including an extracellular domain that binds at least one of these antigens and treating the cancer using cells including the CAR.

[0006] Embodiments relate to compositions and methods for treating cancer using CAR cells. Embodiments relate to an isolated nucleic acid sequence encoding a CAR, wherein the CAR comprises an extracellular domain, a transmembrane domain, and an intracellular domain, wherein the extracellular domain of the CAR binds an antigen of a solid tumor. The antigen can comprise FCRL1, MSLN, GPC-3, CD205, CLDN6, ALPP, ROR1, CD70, ACPP, ADAM12, or CLDN182.

[0007] This Summary is not intended to identify key features or essential features of the claimed subject matter, nor is it intended to be used to limit the scope of the claimed subject matter.

### BRIEF DESCRIPTION OF THE DRAWINGS

[0008] The Detailed Description is described with reference to the accompanying figures. The use of the same reference numbers in different figures indicates similar or identical items.

[0009] FIG. 1 shows a schematic diagram illustrating an example of a CAR structure.

[0010] FIG. 2 shows an exemplary structure of a polyspecific binding molecule that interacts with target cells.

[0011] FIG. 3 shows an exemplary structure of a CAR.

[0012] FIGS. 4A, 4B, 4C, and 4D show cytokine release of ALPP CAR T cells cultured with various substrate cells.

[0013] FIGS. 5A, 5B, and 5C show cell proliferation of ALPP CAR T cells cultured with substrate cells.

[0014] FIG. 6A shows the experimental design for in vivo experiments with mice infused with ALPP CAR T cells.

[0015] FIG. 6B shows the results of ALPP expression in murine cells using immunohistochemical staining of.

[0016] FIG. 7 shows the changes in tumor volume of mice in each group over time after ALPP CAR T cell infusions.

[0017] FIGS. 8A, 8B, 8C, and 8D show cytokine release by MSLN CAR T cells cultured with substrate cells.

[0018] FIGS. 9A, 9B, and 9C show proliferation of MSLN CAR T cells cultured with substrate cells.

[0019] FIG. 10A shows the experimental design for in vivo experiments with mice infused with MSLN CAR T cells.

[0020] FIG. 10B shows the results of MSLN expression in murine cells using immunohistochemical staining.

[0021] FIG. 11 shows the changes in tumor volume of mice in each group over time after MSLN CAR T cell infusions.

[0022] FIGS. 12A, 12B, and 12C show cytokine release by CD70 CAR T cells cultured with various substrate cells.

[0023] FIGS. 13A, 13B, 13C, 13D, and 13E show proliferation of CD70 CAR T cells cultured with various substrate cells.

[0024] FIG. 14A shows the experimental design for in vivo experiments with mice infused with CD70 CAR T cells.

[0025] FIG. 14B shows results of CD70 expression in murine cells using immunohistochemical staining.

[0026] FIG. 15 shows the changes in tumor volume of mice in each group over time after CD70 CAR T cell infusions.

[0027] FIG. 16 show ACPP CAR T cells exhibited good anti-tumor activity in vitro.

[0028] FIG. 17 show ACPP CAR T cells exhibited good anti-tumor activity in vitro.

[0029] FIGS. 18A, 18B, and 18C show that ACPP CAR T cells exhibited good anti-tumor activity in mice.

[0030] FIG. 19 shows that ACPP CAR T cells exhibited good anti-tumor activity in mice.

[0031] FIGS. 20A, 20B, and 20C show the expression of FCRL1 in tissues of breast cancer (A), colorectal cancer (B), and ovarian cancer (C).

[0032] FIGS. 21A and 21B show RNA (A) and protein (B) levels of CLDN6 expression in tumor tissues.

[0033] FIGS. 22A and 22B show CLDN6 CAR T cells exhibited good anti-tumor activity in vitro.

[0034] FIG. 22A shows the construct of the vector encoding CLDN6 CAR.

[0035] FIG. 22B shows the expression of CLDN6 on the surface of HEPG2, and Huh-7, and CLDN6 was determined using CLDN6 antibodies.

[0036] FIG. 23 shows the expression of CD137, T cell activation marker, was detected 24 hours after co-culturing CAR T cells or NT cells with HepG2 or Huh7 using flow cytometry.

[0037] FIGS. 24A, 24B, and 24C show determination of IL-2, IFN-γ, and Granzyme B in the supernatant of the cultures 24 hours after co-culturing CAR T cells or NT cells with PC3-wt or PC3-CLDN6 using Cytometric Bead Array (CBA).

[0038] FIGS. 25A and 25B show that CLDN6 CAR T cells exhibited good anti-tumor effect in mice. FIG. 25A shows the experimental design of in vivo experiments with mice, and FIG. 25B shows changes in tumor volume of mice infused with Mock Group of T cells and mice infused with CLDN6 CAR T cells.

[0039] FIGS. 26A and 26B show GPC-3 expression in tumor tissues.

[0040] FIG. 27A shows the construct of the vector encoding GPC-3 CAR.

[0041] FIG. 27B shows the expression of GPC-3 on the surface of HEPG2, and Huh-7, and GPC-3, determined using GPC-3 antibodies.

[0042] FIG. 27C shows western blot results of GPC-3 expression in various cells.

[0043] FIG. 28 shows the expression of CD137, T cell activation marker, was detected 24 hours after co-culturing CAR T cells or NT cells with or without HepG2, and Huh7 using flow cytometry.

[0044] FIGS. 29A, 29B, 29C, and 29D show determination of IL-2, TNF-α, IFN-γ, and Granzyme B in the supernatant of the cultures 24 hours after co-culturing CAR T cells or NT cells with substrate cells.

[0045] FIGS. 30A, 30B, and 30C show results of CellTrace™ assay showing proliferation of CAR T cells co-cultured with substrate cells.

[0046] FIG. 31A shows the experimental design of in vivo experiments with mice.

[0047] FIG. 31B shows changes in tumor volume of mice infused with Mock Group of T cells and mice infused with GPC-3 CAR T cells.

[0048] FIGS. 32A, 32B, and 32C show that ADAM12 CAR T cells have good antitumor effect in vitro.

[0049] FIGS. 33A and 33B show that ADAM12 CAR T cells have good antitumor effect in vitro.

[0050] FIGS. 34A, 34B, and 34C show that ADAM12 CAR T cells proliferate after culturing with substrate cells.

[0051] FIGS. 35A, 35B, and 35C show that ADAM12 CAR T cells have good antitumor effect in vivo.

[0052] FIGS. 36A and 36B show that ADAM12 CAR T cells have good antitumor effect in vivo.

[0053] FIG. 37 shows the ratio of CD4+ and CD8+ cells in the peripheral blood after the mice were infused with CAR T cells.

[0054] FIGS. 38A, 38B, and 38C show CD205 CAR T exhibited good antitumor effect in vitro.

[0055] FIGS. 39A and 39B show CD205 CAR T exhibited good antitumor effect in vitro.

[0056] FIGS. 40A, 40B, and 40C show proliferation of each group of cells using CellTrace™ Cell Proliferation Kit, after CAR T cells and NT cells were co-cultured with the above positive tumor cells.

[0057] FIGS. 41A, 41B, and 41C show CD205 CAR T exhibited good antitumor effect in vivo.

[0058] FIGS. 42A and 42B show CD205 CAR T exhibited good anti-tumor effect in mice.

[0059] FIGS. 43A, and 43B show comparisons of anti-tumor activity of different infused cells.

[0060] FIG. 44 shows CAR T cells targeting CLDN18.2 showed significant anti-tumor ability in mouse DN18.2 positive tumor model.

[0061] FIGS. 45A, and 45B show in vitro proliferation of ROR1 CAR T cells. Sequences and identifiers are provided in the table below.

[0062] FIGS. 46A, 46B, 46C, and 46D show the proliferation of T cells and the reduction of tumor markers in Patient 001 after CAR T cell infusion.

[0063] FIGS. 47A, 47B, and 47C show the proliferation of T cells and CT scanning results for Patient 002 after CAR T cell infusion.

[0064] FIGS. 48A and 48B show the proliferation of T cells in Patient 003 after CAR T cell infusion.

[0065] FIG. 49 shows CT scanning results in Patient 003 after CAR T cell infusion.

[0066] FIGS. 50A, 50B, and 50C show the proliferation of T cells and the reduction of a tumor marker in Patient 004 after CAR T cells infusion.

[0067] FIGS. 51A, 51B, and 51C show the proliferation of T cells and the reduction of a tumor marker in Patient 005 after CAR T cell infusion.

[0068] FIGS. 52A and 52B show CT scanning results of Patient 005 after CAR T cells infusion.

[0069] FIGS. 53A, 53B, 53C, and 53D show the proliferation of T cells, the reduction of a solid tumor marker, and CT scanning results of Patient 006 after CAR T cells infusion.

### DETAILED DESCRIPTION

[0070] Unless defined otherwise, all technical and scientific terms used herein have the same meaning as commonly understood by those of ordinary skill in the art to which the disclosure belongs. Although any method and material similar or equivalent to those described herein can be used in the practice or testing of the present disclosure, preferred methods and materials are described. For the purposes of the present disclosure, the following terms are defined below.

[0071] The articles “a” and “an” are used herein to refer to one or to more than one (i.e., to at least one) of the grammatical object of the article. By way of example, “an element” means one element or more than one element.

[0072] By “about” is meant a quantity, level, value, number, frequency, percentage, dimension, size, amount, weight or length that varies by as much as 20, 15, 10, 9, 8, 7, 6, 5, 4, 3, 2 or 1% to a reference quantity, level, value, number, frequency, percentage, dimension, size, amount, weight or length.

[0073] The term “activation,” as used herein, refers to the state of a cell that has been sufficiently stimulated to induce detectable cellular proliferation. Activation can also be associated with induced cytokine production and detectable effector functions. The term “activated T cells” refers to, among other things, T cells that are undergoing cell division.

[0074] The term “antibody” is used in the broadest sense and refers to monoclonal antibodies (including full length monoclonal antibodies), polyclonal antibodies, multi-specific antibodies (e.g., bispecific antibodies), and antibody fragments so long as they exhibit the desired biological activity or function. The antibodies in the present disclosure may exist in a variety of forms including, for example, polyclonal antibodies; monoclonal antibodies; Fv, Fab, Fab′, and F(ab) 2 fragments; as well as single chain antibodies and humanized antibodies (Harlow et al., 1999, In: Using Antibodies: A Laboratory Manual, Cold Spring Harbor Laboratory Press, NY; Harlow et al., 1989, In: Antibodies: A Laboratory Manual, Cold Spring Harbor, New York; Houston et al., 1988, Proc. Natl. Acad. Sci. USA 85:5879-5883; Bird et al., 1988, Science 242:423-426).

[0075] The term “antibody fragments” refers to a portion of a full length antibody, for example, the antigen binding or variable region of the antibody. Other examples of antibody fragments include Fab, Fab′, F(ab′)₂, and Fv fragments; diabodies; linear antibodies; single-chain antibody molecules; and multi-specific antibodies formed from antibody fragments.

[0076] The term “Fv” refers to the minimum antibody fragment which contains a complete antigen-recognition and -binding site. This fragment consists of a dimer of one heavy- and one light-chain variable region domain in tight, non-covalent association. From the folding of these two domains emanates six hypervariable loops (3 loops each from the H and L chain) that contribute the amino acid residues for antigen binding and confer antigen binding specificity to the antibody. However, even a single variable domain (or half of an Fv including only three complementarity determining regions (CDRs) specific for an antigen) has the ability to recognize and bind antigen, although at a lower affinity than the entire binding site (the dimer).

[0077] An “antibody heavy chain,” as used herein, refers to the larger of the two types of polypeptide chains present in all antibody molecules in their naturally occurring conformations. An “antibody light chain,” as used herein, refers to the smaller of the two types of polypeptide chains present in all antibody molecules in their naturally occurring conformations. K and A light chains refer to the two major antibody light chain isotypes.

[0078] The term “synthetic antibody” refers to an antibody which is generated using recombinant DNA technology, such as, for example, an antibody expressed by a bacteriophage. The term also includes an antibody which has been generated by the synthesis of a DNA molecule encoding the antibody and the expression of the DNA molecule to obtain the antibody, or to obtain an amino acid encoding the antibody. The synthetic DNA is obtained using technology that is available and well known in the art.

[0079] The term “antigen” refers to a molecule that provokes an immune response, which may involve either antibody production, or the activation of specific immunologically-competent cells, or both. Antigens include any macromolecule, including all proteins or peptides, or molecules derived from recombinant or genomic DNA. For example, DNA including a nucleotide sequence or a partial nucleotide sequence encoding a protein or peptide that elicits an immune response, and therefore, encodes an “antigen” as the term is used herein. An antigen need not be encoded solely by a full-length nucleotide sequence of a gene. An antigen can be generated, synthesized or derived from a biological sample including a tissue sample, a tumor sample, a cell, or a biological fluid.

[0080] The term “anti-tumor effect” as used herein, refers to a biological effect associated with a decrease in tumor volume, a decrease in the number of tumor cells, a decrease in the number of metastases, decrease in tumor cell proliferation, decrease in tumor cell survival, an increase in life expectancy of a subject having tumor cells, or amelioration of various physiological symptoms associated with the cancerous condition. An “anti-tumor effect” can also be manifested by the ability of the peptides, polynucleotides, cells, and antibodies in the prevention of the occurrence of tumor in the first place.

[0081] The term “auto-antigen” refers to an endogenous antigen mistakenly recognized by the immune system as being foreign. Auto-antigens include cellular proteins, phosphoproteins, cellular surface proteins, cellular lipids, nucleic acids, glycoproteins, including cell surface receptors.

[0082] The term “autologous” is used to describe a material derived from a subject which is subsequently re-introduced into the same subject.

[0083] The term “allogeneic” is used to describe a graft derived from a different subject of the same species. As an example, a donor subject may be a related or unrelated to the recipient subject, but the donor subject has immune system markers which are similar to the recipient subject.

[0084] The term “xenogeneic” is used to describe a graft derived from a subject of a different species. As an example, the donor subject is from a different species than a recipient subject and the donor subject and the recipient subject can be genetically and immunologically incompatible.

[0085] The term “cancer” refers to a disease characterized by the rapid and uncontrolled growth of aberrant cells. Cancer cells can spread locally or through the bloodstream and lymphatic system to other parts of the body. Examples of various cancers include breast cancer, prostate cancer, ovarian cancer, cervical cancer, skin cancer, pancreatic cancer, colorectal cancer, renal cancer, liver cancer, brain cancer, lymphoma, leukemia, lung cancer, and the like.

[0086] Cancers that may be treated include tumors that are not vascularized, or not yet substantially vascularized, as well as vascularized tumors. The cancers may include non-solid tumors (such as hematological tumors, for example, leukemias and lymphomas) or may include solid tumors. Types of cancers to be treated with the CARs of the disclosure include, but are not limited to, carcinoma, blastoma, and sarcoma, and certain leukemia or lymphoid malignancies, benign and malignant tumors, and malignancies, e.g., sarcomas, carcinomas, and melanomas. Adult tumors/cancers and pediatric tumors/cancers are also included.

[0087] Hematologic cancers are cancers of the blood or bone marrow. Examples of hematological (or hematogenous) cancers include leukemias, including acute leukemias (such as acute lymphocytic leukemia, acute myelocytic leukemia, acute myelogenous leukemia and myeloblastic, promyelocytic, myelomonocytic, monocytic and erythroleukemia), chronic leukemias (such as chronic myelocytic (granulocytic) leukemia, chronic myelogenous leukemia, and chronic lymphocytic leukemia), polycythemia vera, lymphoma, Hodgkin's disease, non-Hodgkin's lymphoma (indolent and high grade forms), multiple myeloma, Waldenstrom's macroglobulinemia, heavy chain disease, myelodysplastic syndrome, hairy cell leukemia and myelodysplasia.

[0088] Solid tumors are abnormal masses of tissue that usually do not contain cysts or liquid areas. Solid tumors can be benign or malignant. Different types of solid tumors are named for the type of cells that form them (such as sarcomas, carcinomas, and lymphomas). Examples of solid tumors, such as sarcomas and carcinomas, include fibrosarcoma, myxosarcoma, liposarcoma, chondrosarcoma, osteosarcoma, synovioma, mesothelioma, Ewing's tumor, leiomyosarcoma, rhabdomyosarcoma, colon carcinoma, lymphoid malignancy, pancreatic cancer, breast cancer, lung cancers, ovarian cancer, prostate cancer, hepatocellular carcinoma, squamous cell carcinoma, basal cell carcinoma, adenocarcinoma, sweat gland carcinoma, medullary thyroid carcinoma, papillary thyroid carcinoma, pheochromocytomas sebaceous gland carcinoma, papillary carcinoma, papillary adenocarcinomas, medullary carcinoma, bronchogenic carcinoma, renal cell carcinoma, hepatoma, bile duct carcinoma, choriocarcinoma, Wilms' tumor, cervical cancer, testicular tumor, seminoma, bladder carcinoma, melanoma, and CNS tumors (such as a glioma (such as brainstem glioma and mixed gliomas), glioblastoma (also known as glioblastoma multiforme), astrocytoma, CNS lymphoma, germinoma, medulloblastoma, Schwannoma craniopharyngioma, ependymoma, pinealoma, hemangioblastoma, acoustic neuroma, oligodendroglioma, meningioma, neuroblastoma, retinoblastoma, and brain metastases).

[0089] A solid tumor antigen is an antigen expressed on a solid tumor. In embodiments, solid tumor antigens are also expressed at low levels on healthy tissue. Examples of solid tumor antigens and their related disease tumors are provided in Table 1.

TABLE 1

| Solid Tumor antigen | Disease tumor |
|---|---|
| PRLR | Breast Cancer |
| CLCA1 | colorectal Cancer |
| MUC12 | colorectal Cancer |
| GUCY2C | colorectal Cancer |
| GPR35 | colorectal Cancer |
| CR1L | Gastric Cancer |
| MUC 17 | Gastric Cancer |
| TMPRSS11B | esophageal Cancer |
| MUC21 | esophageal Cancer |
| TMPRSS11E | esophageal Cancer |
| CD207 | bladder Cancer |
| SLC30A8 | pancreatic Cancer |
| CFC1 | pancreatic Cancer |
| SLC12A3 | Cervical Cancer |
| SSTR1 | Cervical tumor |
| GPR27 | Ovary tumor |
| FZD10 | Ovary tumor |
| TSHR | Thyroid Tumor |
| SIGLEC15 | Urothelial cancer |
| SLC6A3 | Renal cancer |
| KISS1R | Renal cancer |
| QRFPR | Renal cancer: |
| GPR119 | Pancreatic cancer |
| CLDN6 | Endometrial cancer/Urothelial cancer |
| UPK2 | Urothelial cancer (including bladder cancer) |
| ADAM12 | Breast cancer, pancreatic cancer and the like |
| SLC45A3 | Prostate cancer |
| ACPP | Prostate cancer |
| MUC21 | Esophageal cancer |
| MUC16 | Ovarian cancer |
| MS4A12 | Colorectal cancer |
| ALPP | Endometrial cancer |
| CEA | Colorectal carcinoma |
| EphA2 | Glioma |
| FAP | Mesothelioma |
| GPC3 | Lung squamous cell carcinoma |
| IL13-Rα2 | Glioma |
| Mesothelin (MSLN) | Metastatic cancer |
| PSMA | Prostate cancer |
| ROR1 | Breast lung carcinoma |
| VEGFR-II | Metastatic cancer |
| GD2 | Neuroblastoma |
| FR-α | Ovarian carcinoma |
| ErbB2 | Carcinomas |
| EpCAM | Carcinomas |
| EGFRvIII | Glioma—Glioblastoma |
| EGFR | Glioma—NSCL cancer |
| tMUC 1 | Cholangiocarcinoma, Pancreatic cancer, Breast |
| | Cancer |
| PSCA | pancreas, stomach, or prostate cancer |

[0090] Throughout this specification, unless the context requires otherwise, the words “comprise,” “includes” and “including” will be understood to imply the inclusion of a stated step or element (ingredient or component) or group of steps or elements (ingredients or components) but not the exclusion of any other step or element or group of steps or elements.

[0091] The phrase “consisting of” is meant to include, and is limited to, whatever follows the phrase “consisting of.” Thus, the phrase “consisting of” indicates that the listed elements are required or mandatory and that no other elements may be present.

[0092] The phrase “consisting essentially of” is meant to include any element listed after the phrase and can include other elements that do not interfere with or contribute to the activity or action specified in the disclosure for the listed elements, for example, the function of killing or inhibiting the growth of cancer cells. Thus, the phrase “consisting essentially of” indicates that the listed elements are required or mandatory, but that other elements are optional and may or may not be present depending upon whether or not they affect the activity or action of the listed elements.

[0093] The terms “complementary” and “complementarity” refer to polynucleotides (i.e., a sequence of nucleotides) related by the base-pairing rules. For example, the sequence “A-G-T,” is complementary to the sequence “T-C-A.” Complementarity may be “partial,” in which only some of the nucleic acids' bases are matched according to the base pairing rules or there may be “complete” or “total” complementarity between the nucleic acids. The degree of complementarity between nucleic acid strands has significant effects on the efficiency and strength of hybridization between nucleic acid strands.

[0094] The term “corresponds to” or “corresponding to” refers to (a) a polynucleotide having a nucleotide sequence that is substantially identical or complementary to all or a portion of a reference polynucleotide sequence or encoding an amino acid sequence identical to an amino acid sequence in a peptide or protein; or (b) a peptide or polypeptide having an amino acid sequence that is substantially identical to a sequence of amino acids in a reference peptide or protein.

[0095] The term “co-stimulatory ligand” refers to a molecule on an antigen presenting cell (e.g., an APC, dendritic cell, B cell, and the like) that specifically binds a cognate co-stimulatory molecule on a T cell, thereby providing a signal which, in addition to the primary signal provided by, for instance, binding of a TCR/CD3 complex with an MHC molecule loaded with peptide, mediates a T cell response, including at least one of proliferation, activation, differentiation, and other cellular responses. A co-stimulatory ligand can include B7-1 (CD80), B7-2 (CD86), PD-L1, PD-L2, 4-1BBL, OX40L, inducible co-stimulatory ligand (ICOS-L), intercellular adhesion molecule (ICAM), CD30L, CD40, CD70, CD83, HLA-G, MICA, MICB, HVEM, lymphotoxin beta receptor, 3/TR6, ILT3, ILT4, HVEM, a ligand for CD7, an agonist or antibody that binds the Toll ligand receptor and a ligand that specifically binds with B7-H3. A co-stimulatory ligand also includes, inter alia, an agonist or an antibody that specifically binds with a co-stimulatory molecule present on a T cell, such as CD27, CD28, 4-1BB, OX40, CD30, CD40, PD-1, ICOS, lymphocyte function-associated antigen-1 (LFA-1), CD2, CD7, LIGHT, NKG2C, B7-H3, and a ligand that specifically binds CD83.

[0096] The term “co-stimulatory molecule” refers to the cognate binding partner on a T cell that specifically binds with a co-stimulatory ligand, thereby mediating a co-stimulatory response by the T cell, such as proliferation. Co-stimulatory molecules include an MHC class I molecule, BTLA, and a Toll-like receptor.

[0097] The term “co-stimulatory signal” refers to a signal, which in combination with a primary signal, such as TCR/CD3 ligation, leads to T cell proliferation and/or upregulation or downregulation of key molecules. The terms “disease” and “condition” may be used interchangeably or may be different in that the particular malady or condition may not have a known causative agent (so that etiology has not yet been worked out), and it is therefore not yet recognized as a disease but only as an undesirable condition or syndrome, wherein a more or less specific set of symptoms have been identified by clinicians. The term “disease” is a state of health of a subject wherein the subject cannot maintain homeostasis, and wherein if the disease is not ameliorated then the subject's health continues to deteriorate. In contrast, a “disorder” in a subject is a state of health in which the animal is able to maintain homeostasis, but in which the animal's state of health is less favorable than it would be in the absence of the disorder. Left untreated, a disorder does not necessarily cause a further decrease in the animal's state of health.

[0098] The term “effective” refers to adequate to accomplish a desired, expected, or intended result. For example, an “effective amount” in the context of treatment may be an amount of a compound sufficient to produce a therapeutic or prophylactic benefit.

[0099] The term “encoding” refers to the inherent property of specific sequences of nucleotides in a polynucleotide, such as a gene, a cDNA, or an mRNA, to serve as a template for the synthesis of other polymers and macromolecules in biological processes having either a defined sequence of nucleotides (i.e., rRNA, tRNA and mRNA) or a defined sequence of amino acids and the biological properties resulting therefrom. Thus, a gene encodes a protein if transcription and translation of mRNA corresponding to that gene produces the protein in a cell or other biological system. Both the coding strand, the nucleotide sequence of which is identical to the mRNA sequence (except that a “T” is replaced by a “U”) and is usually provided in sequence listings, and the non-coding strand, used as the template for transcription of a gene or cDNA, can be referred to as encoding the protein or other product of that gene or cDNA.

[0100] The term “exogenous” refers to a molecule that does not naturally occur in a wild-type cell or organism but is typically introduced into the cell by molecular biological techniques. Examples of exogenous polynucleotides include vectors, plasmids, and/or man-made nucleic acid constructs encoding the desired protein. With regard to polynucleotides and proteins, the term “endogenous” or “native” refers to naturally-occurring polynucleotide or amino acid sequences that may be found in a given wild-type cell or organism. Also, a particular polynucleotide sequence that is isolated from a first organism and transferred to a second organism by molecular biological techniques is typically considered an “exogenous” polynucleotide or amino acid sequence with respect to the second organism. In specific embodiments, polynucleotide sequences can be “introduced” by molecular biological techniques into a microorganism that already contains such a polynucleotide sequence, for instance, to create one or more additional copies of an otherwise naturally-occurring polynucleotide sequence, and thereby facilitate overexpression of the encoded polypeptide.

[0101] The term “expression” refers to the transcription and/or translation of a particular nucleotide sequence driven by its promoter.

[0102] The term “expression vector” refers to a vector including a recombinant polynucleotide including expression control (regulatory) sequences operably linked to a nucleotide sequence to be expressed. An expression vector includes sufficient cis-acting elements for expression; other elements for expression can be supplied by the host cell or in an in vitro expression system. Expression vectors include all those known in the art, such as cosmids, plasmids (e.g., naked or contained in liposomes) and viruses (e.g., lentiviruses, retroviruses, adenoviruses, and adeno-associated viruses) that incorporate the recombinant polynucleotide.

[0103] The term “homologous” refers to sequence similarity or sequence identity between two polypeptides or between two polynucleotides when a position in both of the two compared sequences is occupied by the same base or amino acid monomer subunit, e.g., if a position in each of two DNA molecules is occupied by adenine, then the molecules are homologous at that position. The percent of homology between two sequences is a function of the number of matching or homologous positions shared by the two sequences divided by the number of positions compared ×100. For example, if 6 of 10 of the positions in two sequences are matched or homologous then the two sequences are 60% homologous. By way of example, the DNA sequences ATTGCC and TATGGC share 50% homology. A comparison is made when two sequences are aligned to give maximum homology.

[0104] The term “immunoglobulin” or “Ig,” refers to a class of proteins, which function as antibodies. The five members included in this class of proteins are IgA, IgG, IgM, IgD, and IgE. IgA is the primary antibody that is present in body secretions, such as saliva, tears, breast milk, gastrointestinal secretions and mucus secretions of the respiratory and genitourinary tracts. IgG is the most common circulating antibody. IgM is the main immunoglobulin produced in the primary immune response in most subjects. It is the most efficient immunoglobulin in agglutination, complement fixation, and other antibody responses, and is important in defense against bacteria and viruses. IgD is the immunoglobulin that has no known antibody function but may serve as an antigen receptor. IgE is the immunoglobulin that mediates immediate hypersensitivity by causing the release of mediators from mast cells and basophils upon exposure to the allergen.

[0105] The term “isolated” refers to a material that is substantially or essentially free from components that normally accompany it in its native state. The material can be a cell or a macromolecule such as a protein or nucleic acid. For example, an “isolated polynucleotide,” as used herein, refers to a polynucleotide, which has been purified from the sequences which flank it in a naturally-occurring state, e.g., a DNA fragment which has been removed from the sequences that are normally adjacent to the fragment. Alternatively, an “isolated peptide” or an “isolated polypeptide” and the like, as used herein, refer to in vitro isolation and/or purification of a peptide or polypeptide molecule from its natural cellular environment, and from association with other components of the cell.

[0106] The term “substantially purified” refers to a material that is substantially free from components that normally associated with it in its native state. For example, a substantially purified cell refers to a cell that has been separated from other cell types with which it is normally associated in its naturally occurring or native state. In some instances, a population of substantially purified cells refers to a homogenous population of cells. In other instances, this term refers simply to a cell that has been separated from the cells with which they are naturally associated in their natural state. In embodiments, the cells are cultured in vitro. In embodiments, the cells are not cultured in vitro.

[0107] In the context of the present disclosure, the following abbreviations for the commonly occurring nucleic acid bases are used. “A” refers to adenosine, “C” refers to cytosine, “G” refers to guanosine, “T” refers to thymidine, and “U” refers to uridine.

[0108] Unless otherwise specified, a “nucleotide sequence encoding an amino acid sequence” includes all nucleotide sequences that are degenerate versions of each other and that encode the same amino acid sequence. The phrase nucleotide sequence that encodes a protein or an RNA may also include introns to the extent that the nucleotide sequence encoding the protein may in some version contain an intron(s).

[0109] The term “lentivirus” refers to a genus of the Retroviridae family. Lentiviruses are unique among the retroviruses in being able to infect non-dividing cells; they can deliver a significant amount of genetic information into the DNA of the host cell, so they are one of the most efficient methods of a gene delivery vector. Moreover, the use of lentiviruses enables integration of the genetic information into the host chromosome resulting in stably transduced genetic information. HIV, SIV, and FIV are all examples of lentiviruses. Vectors derived from lentiviruses offer the means to achieve significant levels of gene transfer in vivo.

[0110] The term “modulating,” refers to mediating a detectable increase or decrease in the level of a response in a subject compared with the level of a response in the subject in the absence of a treatment or compound, and/or compared with the level of a response in an otherwise identical but untreated subject. The term encompasses perturbing and/or affecting a native signal or response thereby mediating a beneficial therapeutic response in a subject, preferably, a human.

[0111] Nucleic acid is “operably linked” when it is placed into a functional relationship with another nucleic acid sequence. For example, DNA for a presequence or secretory leader is operably linked to DNA for a polypeptide if it is expressed as a preprotein that participates in the secretion of the polypeptide; a promoter or enhancer is operably linked to a coding sequence if it affects the transcription of the sequence; or a ribosome binding site is operably linked to a coding sequence if it is positioned so as to facilitate translation.

[0112] The term “under transcriptional control” refers to a promoter being operably linked to and in the correct location and orientation in relation to a polynucleotide to control the initiation of transcription by RNA polymerase and expression of the polynucleotide.

[0113] The term “overexpressed” tumor antigen or “overexpression” of the tumor antigen is intended to indicate an abnormal level of expression of the tumor antigen in a cell from a disease area such as a solid tumor within a specific tissue or organ of the patient relative to the level of expression in a normal cell from that tissue or organ. Patients having solid tumors or a hematological malignancy characterized by overexpression of the tumor antigen can be determined by standard assays known in the art.

[0114] The term “parenteral administration” of a composition includes, e.g., subcutaneous (s.c.), intravenous (i.v.), intramuscular (i.m.), intrasternal injection, or infusion techniques.

[0115] The terms “patient,” “subject,” and “individual,” and the like are used interchangeably herein, and refer to any animal, such as a mammal, for example a human, or any living organism, amenable to the methods described herein. In certain non-limiting embodiments, the patient, subject, or individual is a human or mammal. In embodiments, the term “subject” is intended to include living organisms in which an immune response can be elicited (e.g., mammals). Examples of subjects include humans, and animals such as dogs, cats, mice, rats, and transgenic species thereof.

[0116] A subject in need of treatment or in need thereof includes a subject having a disease, condition, or disorder that needs to be treated. A subject in need thereof also includes a subject that needs treatment for prevention of a disease, condition, or disorder. In embodiments, the disease, condition, or disorder is cancer.

[0117] The term “polynucleotide” or “nucleic acid” refers to mRNA, RNA, cRNA, rRNA, cDNA or DNA. The term typically refers to a polymeric form of nucleotides of at least 10 bases in length, either ribonucleotides or deoxynucleotides or a modified form of either type of nucleotide. The term includes all forms of nucleic acids including single and double stranded forms of nucleic acids.

[0118] The terms “polynucleotide variant” and “variant” and the like refer to polynucleotides displaying substantial sequence identity with a reference polynucleotide sequence or polynucleotides that hybridize with a reference sequence under stringent conditions that are defined hereinafter. These terms also encompass polynucleotides that are distinguished from a reference polynucleotide by the addition, deletion or substitution of at least one nucleotide. Accordingly, the terms “polynucleotide variant” and “variant” include polynucleotides in which one or more nucleotides have been added or deleted or replaced with different nucleotides. In this regard, it is well understood in the art that certain alterations inclusive of mutations, additions, deletions, and substitutions can be made to a reference polynucleotide whereby the altered polynucleotide retains the biological function or activity of the reference polynucleotide or has increased activity in relation to the reference polynucleotide (i.e., optimized). Polynucleotide variants include, for example, polynucleotides having at least 50% (and at least 51% to at least 99% and all integer percentages in between, e.g., 90%, 95%, or 98%) sequence identity with a reference polynucleotide sequence described herein. The terms “polynucleotide variant” and “variant” also include naturally-occurring allelic variants and orthologs.

[0119] The terms “polypeptide,” “polypeptide fragment,” “peptide,” and “protein” are used interchangeably herein to refer to a polymer of amino acid residues and to variants and synthetic analogues of the same. Thus, these terms apply to amino acid polymers in which one or more amino acid residues are synthetic non-naturally occurring amino acids, such as a chemical analogue of a corresponding naturally occurring amino acid, as well as to naturally-occurring amino acid polymers. In certain aspects, polypeptides may include enzymatic polypeptides, or “enzymes,” which typically catalyze (i.e., increase the rate of) various chemical reactions.

[0120] The term “polypeptide variant” refers to polypeptides that are distinguished from a reference polypeptide sequence by the addition, deletion, or substitution of at least one amino acid residue. In embodiments, a polypeptide variant is distinguished from a reference polypeptide by one or more substitutions, which may be conservative or non-conservative. In embodiments, the polypeptide variant comprises conservative substitutions and, in this regard, it is well understood in the art that some amino acids may be changed to others with broadly similar properties without changing the nature of the activity of the polypeptide. Polypeptide variants also encompass polypeptides in which one or more amino acids have been added or deleted or replaced with different amino acid residues.

[0121] The term “promoter” refers to a DNA sequence recognized by the synthetic machinery of the cell or introduced synthetic machinery, required to initiate the specific transcription of a polynucleotide sequence. The term “expression control (regulatory) sequences” refers to DNA sequences necessary for the expression of an operably linked coding sequence in a particular host organism. The control sequences that are suitable for prokaryotes, for example, include a promoter, optionally an operator sequence, and a ribosome binding site. Eukaryotic cells are known to utilize promoters, polyadenylation signals, and enhancers.

[0122] The term “bind,” “binds,” or “interacts with” refers to a molecule recognizing and adhering to a second molecule in a sample or organism but does not substantially recognize or adhere to other structurally unrelated molecules in the sample. The term “specifically binds,” as used herein with respect to an antibody, refers to an antibody which recognizes a specific antigen, but does not substantially recognize or bind other molecules in a sample. For example, an antibody that specifically binds an antigen from one species may also bind that antigen from one or more species. But, such cross-species reactivity does not itself alter the classification of an antibody as specific. In another example, an antibody that specifically binds an antigen may also bind different allelic forms of the antigen. However, such cross reactivity does not itself alter the classification of an antibody as specific. In some instances, the terms “specific binding” or “specifically binding,” can be used in reference to the interaction of an antibody, a protein, or a peptide with a second chemical species, to mean that the interaction is dependent upon the presence of a particular structure (e.g., an antigenic determinant or epitope) on the chemical species; for example, an antibody recognizes and binds a specific protein structure rather than to any protein. If an antibody is specific for epitope “A,” the presence of a molecule containing epitope A (or free, unlabeled A), in a reaction containing labeled “A” and the antibody, will reduce the amount of labeled A bound to the antibody.

[0123] A “binding protein” is a protein that is able to bind non-covalently to another molecule. A binding protein can bind to, for example, a DNA molecule (a DNA-binding protein), an RNA molecule (an RNA-binding protein) and/or a protein molecule (a protein-binding protein). In the case of a protein-binding protein, it can bind to itself (to form homodimers, homotrimers, etc.) and/or it can bind to one or more molecules of a different protein or proteins. A binding protein can have more than one type of binding activity. For example, zinc finger proteins have DNA-binding, RNA-binding, and protein-binding activity.

[0124] A “zinc finger DNA binding protein” (or binding domain) is a protein, or a domain within a larger protein, that binds DNA in a sequence-specific manner through one or more zinc fingers, which are regions of amino acid sequence within the binding domain whose structure is stabilized through coordination of a zinc ion. The term zinc finger DNA binding protein is often abbreviated as zinc finger protein or ZFP.

[0125] Zinc finger binding domains can be “engineered” to bind to a predetermined nucleotide sequence, for example via engineering (altering one or more amino acids) of the recognition helix region of a naturally occurring zinc finger protein. Further, a Zinc finger binding domain may be fused a DNA-cleavage domain to form a Zinc finger nuclease (ZFN) targeting a specific desired DNA sequence. For example, a pair of ZFNs (e.g., a ZFN-left arm and a ZFN-right arm) may be engineered to target and cause modifications of specific desired DNA sequences (e.g., TRAC genes).

[0126] “Cleavage” refers to the breakage of the covalent backbone of a DNA molecule. Cleavage can be initiated by a variety of methods including, but not limited to, enzymatic or chemical hydrolysis of a phosphodiester bond. Both single-stranded cleavage and double-stranded cleavage are possible, and double-stranded cleavage can occur as a result of two distinct single-stranded cleavage events. DNA cleavage can result in the production of either blunt ends or staggered ends. In embodiments, fusion polypeptides are used for targeted double-stranded DNA cleavage.

[0127] A “target site” or “target sequence” is a nucleic acid sequence that defines a portion of a nucleic acid to which a binding molecule will bind, provided sufficient conditions for binding exist. For example, the sequence 5′ GAATTC 3′ is a target site for the Eco RI restriction endonuclease.

[0128] A “fusion” molecule is a molecule in which two or more subunit molecules are linked, preferably covalently. The subunit molecules can be the same chemical type of molecule or can be different chemical types of molecules. Examples of the first type of fusion molecule include, but are not limited to, fusion proteins (for example, a fusion between a ZFP DNA-binding domain and one or more activation domains) and fusion nucleic acids (for example, a nucleic acid encoding the fusion protein described supra). Examples of the second type of fusion molecule include, but are not limited to, a fusion between a triplex-forming nucleic acid and a polypeptide, and a fusion between a minor groove binder and a nucleic acid.

[0129] Expression of a fusion protein in a cell can result from delivery of the fusion protein to the cell or by delivery of a polynucleotide encoding the fusion protein to a cell, wherein the polynucleotide is transcribed, and the transcript is translated, to generate the fusion protein. Trans-splicing, polypeptide cleavage, and polypeptide ligation can also be involved in the expression of the protein in a cell. Methods for polynucleotide and polypeptide delivery to cells are presented elsewhere in this disclosure.

[0130] “Modulation” of gene expression refers to a change in the activity of a gene. Modulation of expression can include but is not limited to, gene activation and gene repression. Genome editing (e.g., cleavage, alteration, inactivation, random mutation) can be used to modulate expression. Gene inactivation refers to any reduction in gene expression as compared to a cell that does not include a ZFP as described herein. Thus, gene inactivation may be partial or complete.

[0131] A “region of interest” is any region of cellular chromatin, such as, for example, a gene or a non-coding sequence within or adjacent to a gene, in which it is desirable to bind an exogenous molecule. Binding can be for the purposes of targeted DNA cleavage and/or targeted recombination. A region of interest can be present in a chromosome, an episome, an organellar genome (e.g., mitochondrial, chloroplast), or an infecting viral genome, for example. A region of interest can be within the coding region of a gene, within transcribed non-coding regions such as, for example, leader sequences, trailer sequences or introns, or within non-transcribed regions, either upstream or downstream of the coding region. A region of interest can be as small as a single nucleotide pair or up to 2,000 nucleotide pairs in length, or any integral value of nucleotide pairs.

[0132] By “statistically significant,” it is meant that the result was unlikely to have occurred by chance. Statistical significance can be determined by any method known in the art. Commonly used measures of significance include the p-value, which is the frequency or probability with which the observed event would occur if the null hypothesis were true. If the obtained p-value is smaller than the significance level, then the null hypothesis is rejected. In simple cases, the significance level is defined at a p-value of 0.05 or less. A “decreased” or “reduced” or “lesser” amount is typically a “statistically significant” or a physiologically significant amount, and may include a decrease that is about 1.1, 1.2, 1.3, 1.4, 1.5, 1.6 1.7, 1.8, 1.9, 2, 2.5, 3, 3.5, 4, 4.5, 5, 6, 7, 8, 9, 10, 15, 20, 30, 40, or 50 or more times (e.g., 100, 500, 1000 times) (including all integers and decimal points in between and above 1, e.g., 1.5, 1.6, 1.7. 1.8, etc.) an amount or level described herein.

[0133] The term “stimulation,” refers to a primary response induced by binding of a stimulatory molecule (e.g., a TCR/CD3 complex) with its cognate ligand thereby mediating a signal transduction event, such as signal transduction via the TCR/CD3 complex. Stimulation can mediate altered expression of certain molecules, such as downregulation of TGF-β, and/or reorganization of cytoskeletal structures. CD3 zeta is not the only suitable primary signaling domain for a CAR construct with respect to the primary response. For example, back in 1993, both CD3 zeta and FcRγ were shown as functional primary signaling domains of CAR molecules. Eshhar et al., “Specific activation and targeting of cytotoxic lymphocytes through chimeric single chains consisting of antibody-binding domains and the gamma or zeta subunits of the immunoglobulin and T cell receptors” PNAS, 1993 Jan. 15; 90(2):720-4, showed that two CAR constructs in which an scFv was fused to “either the FcR gamma chain or the CD3 complex chain” triggered T cell activation and target cell. Notably, as demonstrated in Eshhar et al., CAR constructs containing only the primary signaling domain CD3 zeta or FcR gamma are functional without the co-presence of co-stimulatory domains. Additional non-CD3 zeta based CAR constructs have been developed over the years. For example, Wang et al. (“A Chimeric Antigen Receptor (CARs) Based Upon a Killer Immunoglobulin-Like Receptor (KIR) Triggers Robust Cytotoxic Activity in Solid Tumors” Molecular Therapy, vol. 22, no. Suppl. 1, May 2014, page S57) tested a CAR molecule in which an scFv was fused to “the transmembrane and cytoplasmic domain of” a killer immunoglobulin-like receptor (KIR). Wang et al. reported that, “a KIR-based CAR targeting mesothelin (SS 1-KIR) triggers antigen-specific cytotoxic activity and cytokine production that is comparable to CD3˜-based CARs.” A second publication from the same group, Wang et al. (“Generation of Potent T-cell Immunotherapy for Cancer Using DAP12-Based, Multichain, Chimeric Immunoreceptors” Cancer Immunol Res. 2015 July; 3(7):815-26) showed that a CAR molecule in which “a single-chain variable fragment for antigen recognition was fused to the transmembrane and cytoplasmic domains of KIR2DS2, a stimulatory killer immunoglobulin-like receptor (KIR)” functioned both in vitro and in vivo “when introduced into human T cells with DAP12, an immunotyrosine-based activation motifs-containing adaptor.”

[0134] The term “stimulatory molecule” refers to a molecule on a T cell that specifically binds a cognate stimulatory ligand present on an antigen presenting cell. For example, a functional signaling domain derived from a stimulatory molecule is the zeta chain associated with the T cell receptor complex. The stimulatory molecule includes a domain responsible for signal transduction.

[0135] The term “stimulatory ligand” refers to a ligand that when present on an antigen presenting cell (e.g., an APC, a dendritic cell, a B-cell, and the like.) can specifically bind with a cognate binding partner (referred to herein as a “stimulatory molecule”) on a cell, for example a T cell, thereby mediating a primary response by the T cell, including activation, initiation of an immune response, proliferation, and similar processes. Stimulatory ligands are well-known in the art and encompass, inter alia, an MHC Class I molecule loaded with a peptide, an anti-CD3 antibody, a superagonist anti-CD28 antibody, and a superagonist anti-CD2 antibody.

[0136] The term “therapeutic” refers to a treatment and/or prophylaxis. A therapeutic effect is obtained by suppression, remission, or eradication of a disease state or alleviating the symptoms of a disease state.

[0137] The term “therapeutically effective amount” refers to the amount of the subject compound that will elicit the biological or medical response of a tissue, system, or subject that is being sought by the researcher, veterinarian, medical doctor or another clinician. The term “therapeutically effective amount” includes that amount of a compound that, when administered, is sufficient to prevent the development of, or alleviate to some extent, one or more of the signs or symptoms of the disorder or disease being treated. The therapeutically effective amount will vary depending on the compound, the disease and its severity and the age, weight, etc., of the subject to be treated.

[0138] The term “treat a disease” refers to the reduction of the frequency or severity of at least one sign or symptom of a disease or disorder experienced by a subject.

[0139] The term “transfected” or “transformed” or “transduced” refers to a process by which an exogenous nucleic acid is transferred or introduced into the host cell. A “transfected” or “transformed” or “transduced” cell is one which has been transfected, transformed, or transduced with exogenous nucleic acid. The cell includes the primary subject cell and its progeny.

[0140] The term “vector” refers to a polynucleotide that comprises an isolated nucleic acid and which can be used to deliver the isolated nucleic acid to the interior of a cell in vitro and in vivo (in a subject). Numerous vectors are known in the art including linear polynucleotides, polynucleotides associated with ionic or amphiphilic compounds, plasmids, and viruses. Thus, the term “vector” includes an autonomously replicating plasmid or a virus. The term also includes non-plasmid and non-viral compounds which facilitate transfer of nucleic acid into cells, such as, for example, polylysine compounds, liposomes, and the like. Examples of viral vectors include, adenoviral vectors, adeno-associated virus vectors, retroviral vectors, and others. For example, lentiviruses are complex retroviruses, which, in addition to the common retroviral genes gag, pol, and env, contain other genes with regulatory or structural function. Lentiviral vectors are well known in the art. Some examples of lentivirus include the Human Immunodeficiency Viruses: HIV-1, HIV-2, and the Simian Immunodeficiency Virus: SIV. Lentiviral vectors have been generated by multiply attenuating the HIV virulence genes, for example, the genes env, vif, vpr, vpu, and nef are deleted making the vector biologically safe.

[0141] Ranges: throughout this disclosure, various aspects of the disclosure can be presented in a range format. It should be understood that the description in range format is merely for convenience and brevity and should not be construed as an inflexible limitation on the scope of the disclosure. Accordingly, the description of a range should be considered to have specifically disclosed all the possible subranges as well as individual numerical values within that range. For example, description of a range such as from 1 to 6 should be considered to have specifically disclosed subranges such as from 1 to 3, from 1 to 4, from 1 to 5, from 2 to 4, from 2 to 6, from 3 to 6 etc., as well as individual numbers within that range, for example, 1, 2, 2.7, 3, 4, 5, 5.3, and 6. This applies regardless of the breadth of the range.

[0142] Embodiments of the present disclosure relate to treating cancer using chimeric antigen receptor (CAR) cells. Embodiments relate to an isolated nucleic acid encoding a CAR, wherein the CAR comprises an extracellular domain, a transmembrane domain, and an intracellular domain, wherein the extracellular domain of the CAR binds an antigen of a solid tumor. For example, transcriptional data shows that expression of antigens such as SLC6A3, KISS1R, QRFPR in normal tissues is very low, but expression of such antigens in cells related to renal cancer is high. Information of some of the antigens is provided below in

[0143] The T cell response in a subject refers to cell-mediated immunity associated with a helper, killer, regulatory, and other types T cells. For example, T cell response may include activities such as assistance to other white blood cells in immunologic processes and identifying and destroying virus-infected cells and tumor cells. T cell response in the subject can be measured via various indicators such as a number of virus-infected cells and/or tumor cells that T cells has killed, an amount of cytokines that the T cells has released in co-culturing with virus-infected cells and/or tumor cells, a level of proliferation of T cells in the subject, a phenotype change of T cells (e.g., changes to memory T cells), and a level of longevity or lifetime of T cells in the subject.

[0144] In embodiments, in vitro killing assay may be performed by measuring the killing efficacy of CAR T cells by co-culturing CAR T cells with antigen-positive cells. CAR T cells can be considered to have killing effect on the corresponding antigen-positive cells by showing a decrease in the number of corresponding antigen-positive cells co-cultured with CAR T cells and an increase in the release of cytokines such as IFNγ, TNFα, etc. as compared to control cells that do not express the corresponding antigen. Further, in vivo antitumor activity of the CAR T cells can be tested. For example, xenograft models can be established using the antigens described herein in immunodeficient mice. Heterotransplantation of human cancer cells or tumor biopsies into immunodeficient rodents (xenograft models) has, for the past two decades, constituted the major preclinical screen for the development of novel cancer therapeutics (Song et al., Cancer Res. PMC 2014 Aug. 21, and Morton et al., Nature Protocols, 2, -247-250 (2007)). To evaluate the anti-tumor activity of CAR T cells in vivo, immunodeficient mice bearing tumor xenografts were evaluated for CAR T cell anti-tumor activity (e.g., a decrease in mouse tumors and mouse blood IFNγ, TNFα, et al.).

[0145] The term “chimeric antigen receptor” or alternatively a “CAR” refers to a recombinant polypeptide construct comprising at least an extracellular antigen binding domain, a transmembrane domain and an intracellular signaling domain (e.g., cytoplasmic domain). In embodiments, the domains in the CAR polypeptide construct are on the same polypeptide chain (e.g., comprising a chimeric fusion protein). In embodiments, the domains of the CAR polypeptide are not on the same molecule, e.g. not contiguous with each other or are on different polypeptide chains.

[0146] In embodiments, the intracellular signaling domain may include a functional signaling domain derived from a stimulatory molecule and/or a co-stimulatory molecule as described herein. In embodiments, the intracellular signaling domain includes a functional signaling domain derived from a primary signaling domain (e.g., a primary signaling domain of CD3-zeta). In embodiments, the intracellular signaling domain further includes one or more functional signaling domains derived from at least one co-stimulatory molecule. The co-stimulatory signaling region refers to a portion of the CAR including the intracellular domain of a co-stimulatory molecule. Co-stimulatory molecules can include cell surface molecules for inducing an efficient response from the lymphocytes (in response to an antigen).

[0147] Between the extracellular domain and the transmembrane domain of the CAR, there can be incorporated a spacer domain. As used herein, the term “spacer domain” generally means any oligo- or polypeptide that functions to link the transmembrane domain to the extracellular domain and/or the cytoplasmic domain in the polypeptide chain. A spacer domain may include up to 300 amino acids, 10 to 100 amino acids, or 25 to 50 amino acids.

[0148] The extracellular domain of a CAR may include an antigen binding domain (e.g., a scFv, a single domain antibody, or TCR, such as a TCR alpha binding domain or a TCR beta binding domain) that targets a specific tumor marker (e.g., a tumor antigen). Tumor antigens are proteins that are produced by tumor cells that elicit an immune response, particularly T cell mediated immune responses. Tumor antigens are well known in the art and include, for example, a glioma-associated antigen, carcinoembryonic antigen (CEA), 8-human chorionic gonadotropin, alphafetoprotein (AFP), lectin-reactive AFP, thyroglobulin, RAGE-1, MN-CA IX, human telomerase reverse transcriptase, RU1, RU2 (AS), intestinal carboxyl esterase, mut hsp70-2, M-CSF, prostase, prostate-specific antigen (PSA), PAP, NY-ESO-1, LAGE-la, p53, prostein, PSMA, Her2/neu, survivin and telomerase, prostate-carcinoma tumor antigen-1 (PCTA-1), MAGE, ELF2M, neutrophil elastase, ephrinB2, CD22, insulin growth factor (IGF)-I, IGF-II, IGF-I receptor and mesothelin. For example, when the antigen that the CAR binds is CD19, the CAR thereof is referred to as CD19CAR.

[0149] In embodiments, the extracellular ligand-binding domain comprises a scFv comprising the light chain variable (VL) region and the heavy chain variable (VH) region of a target antigen-specific monoclonal antibody joined by a flexible linker. Single chain variable region fragments are made by linking light and/or heavy chain variable regions by using a short linking peptide (Bird et al., Science 242:423-426, 1988). An example of a linking peptide is the GS linker having the amino acid sequence (GGGGS)₃ (SEQ ID NO: 338), which bridges approximately 3.5 nm between the carboxy terminus of one variable region and the amino terminus of the other variable region. Linkers of other sequences have been designed and used (Bird et al., 1988, supra). In general, linkers can be short, flexible polypeptides comprising about 20 or fewer amino acid residues. Linkers can in turn be modified for additional functions, such as attachment of drugs or attachment to solid supports. The single chain variants can be produced either recombinantly or synthetically. For synthetic production of scFv, an automated synthesizer can be used. For recombinant production of scFv, a suitable plasmid containing polynucleotide that encodes the scFv can be introduced into a suitable host cell, either eukaryotic, such as yeast, plant, insect or mammalian cells, or prokaryotic, such as E. coli. Polynucleotides encoding the scFv of interest can be made by routine manipulations such as ligation of polynucleotides. The resultant scFv can be isolated using standard protein purification techniques known in the art.

[0150] In embodiments, the tumor antigen includes HER2, CD19, CD20, CD22, Kappa or light chain, CD30, CD33, CD123, CD38, ROR1, ErbB3/4, EGFR, EGFRvIII, EphA2, FAP, carcinoembryonic antigen, EGP2, EGP40, mesothelin, TAG72, PSMA, NKG2D ligands, B7-H6, IL-13 receptor α 2, IL-11 receptor α, MUC1, MUC16, CA9, GD2, GD3, HMW-MAA, CD171, Lewis Y, G250/CAIX, HLA-AI MAGE A1, HLA-A2 NY-ESO-1, PSC1, folate receptor-α, CD44v7/8, 8H9, NCAM, VEGF receptors, 5T4, Fetal AchR, NKG2D ligands, CD44v6, TEM1, TEM8, or viral-associated antigens expressed by a tumor. In embodiments, the binding element of the CAR can include any antigen binding moiety that when bound to its cognate antigen, affects a tumor cell such that the tumor cell fails to grow, or is forced to die or diminish.

[0151] The present disclosure also relates to a bispecific chimeric antigen receptor (See FIG. 3), a polynucleotide encoding the bispecific chimeric antigen receptor, and/or a modified cell comprising the polynucleotide, wherein the bispecific chimeric antigen receptor comprises a first antigen binding domain, a second antigen binding domain, a cytoplasmic domain, and a transmembrane domain, and wherein the first antigen binding domain recognizes a first antigen, and the second antigen binding domain recognize a second antigen. In embodiments, the first antigen is an antigen associated with a white blood cell, and the second antigen is a solid tumor antigen. In embodiments, the first and second antigens are identical or different. In embodiments, the first and second antigens are both solid tumor antigens.

[0152] In embodiments, the intracellular domain of the CAR comprises a co-stimulatory signaling region that comprises an intracellular domain of a co-stimulatory molecule selected from the group consisting of CD27, CD28, 4-1BB, OX40, CD30, CD40, PD-1, ICOS, lymphocyte function-associated antigen-1 (LFA-1), CD2, CD7, LIGHT, NKG2C, B7-H3, and any combination thereof.

[0153] In embodiments, the intracellular domain comprises a CD3 zeta signaling domain. Embodiments relate to a vector comprising the isolated nucleic acid sequence described herein. Embodiments relate to an isolated cell comprising the isolated nucleic acid sequence described herein.

[0154] Embodiments relate to a composition comprising a population of cells including T cells comprising the CAR described herein. Embodiments relate to a CAR encoded by the isolated nucleic acid sequence described herein. In embodiments, an isolated nucleic acid sequence encodes a chimeric antigen receptor (CAR), wherein the CAR comprises an extracellular domain, a transmembrane domain, and an intracellular domain, wherein the extracellular domain binds an antigen of a tumor (e.g., solid tumor). In embodiments, the extracellular domain binds FCRL1, MSLN, GPC-3, CD205, ALPP, CLCN6, and CD70. In embodiments, the CAR comprises one of the amino acid sequences of Tables 2-4. In embodiments, a method of eliciting and/or enhancing T-cell response in a subject having a solid tumor or treating a solid tumor in the subject, the method comprising administering an effective amount of T cells comprising the CAR.

[0155] Mesothelin (MSLN) is a glycosylphosphatidylinositol-anchored cell-surface protein that can function as a cell adhesion protein. This protein is overexpressed in epithelial mesotheliomas, ovarian cancers and in specific squamous cell carcinomas.

[0156] ALPP is a metalloenzyme that catalyzes the hydrolysis of phosphoric acid monoesters. The protein is primarily expressed in placental and endometrial tissue; however, strong ectopic expression has been detected in ovarian adenocarcinoma, serous cystadenocarcinoma, and other ovarian cancer cells.

[0157] GPC-3 (Glypican-3, or GPC3), a member of the glypican-related integral membrane proteoglycan family (GRIPS), contains a core protein anchored to the cytoplasmic membrane via a glycosyl phosphatidylinositol linkage. GPC-3 plays a role in the control of cell division and growth regulation. The protein encoded by the GPC-3 gene can bind to and inhibit the dipeptidyl peptidase activity of CD26, and it can induce apoptosis in certain cell types. In embodiments, various CARs were designed to target GPC-3. In embodiments, a CAR comprises at least one of SEQ ID NOs: 16-21 and 148-177, and the CAR binds SEQ ID NO: 15.

[0158] CD70 is a cytokine belonging to the tumor necrosis factor (TNF) ligand family. This cytokine is a ligand for TNFRSF27/CD27. It is a surface antigen on activated T and B lymphocytes, but not on resting, T and B lymphocytes. It induces proliferation of co-stimulated T cells, enhances the generation of cytolytic T cells, and contributes to T cell activation. This cytokine is also reported to play a role in regulating B cell activation, cytotoxic function of natural killer cells, and immunoglobulin synthesis. Examples of CD70 CAR include 1) a traditional carrier (41-BB and CD3 zeta) followed by a CD70 scFv, 2) a traditional carrier connected to the extracellular segment of CD27, and 3) CD27 FL C-terminal integrated with a CD3 zeta (e.g., CD27 and CD3 zeta). In embodiments, various CARs were designed to target CD70. In embodiments, a CAR comprises at least one of SEQ ID NOs: 2, 3, 85-108, and 271-297, and the CAR binds SEQ ID NO: 1.

[0159] CD205 is a type I endocytic receptor protein to direct captured antigens from the extracellular space to a specialized antigen-processing compartment. CD205 has been found to be expressed in breast cancer such as HER2 negative breast cancer, triple negative breast cancer, pancreatic cancer, and bladder cancer. In embodiments, various CARs were designed to target CD205. In embodiments, a CAR comprises at least one of SEQ ID NOs: 5-10 and 109-114, and the CAR binds SEQ ID NO: 4.

[0160] ADAM12 (A Disintegrin and Metalloprotease 12) is upregulated in human breast cancers and is a predictor of chemoresistance in estrogen receptor-negative tumors. ADAM12 is induced during epithelial-to-mesenchymal transition, a feature associated with claudin-low breast tumors, which are enriched in cancer stem cell (CSC) markers. In embodiments, various CARs were designed to target ADAM12. In embodiments, a CAR comprises at least one of SEQ ID NOs: 38-40 and 52-57, and the CAR binds SEQ ID NO: 37.

[0161] ALPP (Alkaline phosphatase, placental type), mainly expressed in placenta and testis, is overexpressed on certain tumor cell types, such as on a proportion of colorectal cancers. In embodiments, various CARs were designed to target ALPP. In embodiments, a CAR comprises at least one of SEQ ID NOs: 42-44 and 68-84, and the CAR binds SEQ ID NO: 41.

[0162] Prostatic Acid Phosphatase (PAP), an enzyme expressed by the Acid Phosphatase, Prostate (ACPP) gene, is predominantly produced in the prostate, and is an important biomarker that is used to assess and monitor prostate cancer. In embodiments, various CARs were designed to target PAP. In embodiments, a CAR comprises at least one of SEQ ID NOs: 49-51.

[0163] CLDN18.2 (claudin-18 isoform 2) is a protein that in humans is encoded by the CLDN18 gene and belongs to the family of claudin proteins. The claudin family of proteins are transmembrane proteins of the tight junction that control pracellular diffusion within the epithelium. In embodiments, various CARs were designed to target CLDN18.2. In embodiments, a CAR comprises at least one of SEQ ID NOs: 46-48 and 298-318, and the CAR binds SEQ ID NO: 45.

[0164] CLDN6 (Claudin 6) is a Protein Coding gene. Diseases associated with CLDN6 include Hepatitis C Virus and Monosomy 22. Gene Ontology (GO) annotations related to this gene include identical protein binding and structural molecule activity. In embodiments, various CARs were designed to target CLDN6. In embodiments, a CAR comprises at least one of SEQ ID NOs: 12-14 and 115-117, and the CAR binds SEQ ID NO: 11.

[0165] MSLN (Mesothelin) is a Protein Coding gene. Diseases associated with MSLN include Asbestosis and Malignant Pleural Mesothelioma. In embodiments, various CARs were designed to target MSLN. In embodiments, a CAR comprises at least one of SEQ ID NOs: 23-28 and 198-230, and the CAR binds SEQ ID NO: 22.

[0166] MUC16 (Mucin 16, Cell Surface Associated Protein) is a Protein Coding gene. Diseases associated with MUC16 include Clear Cell Adenocarcinoma. In embodiments, various CARs were designed to target MUC16. In embodiments, a CAR comprises at least one of SEQ ID NOs: 30-32 and 231-242, and the CAR binds SEQ ID NO: 29.

[0167] ROR1 (Receptor Tyrosine Kinase Like Orphan Receptor 1) is a Protein Coding gene. Diseases associated with ROR1 include deafness. In embodiments, various CARs were designed to target ROR1. In embodiments, a CAR comprises at least one of SEQ ID NOs: 34-36 and 256-270, and the CAR binds SEQ ID NO: 33.

[0168] AFP (Alpha-fetoprotein) is used as a tumor marker to help detect and diagnose cancers of the liver, testicles, and ovaries. In embodiments, various CARs were designed to target AFP. In embodiments, a CAR comprises at least one of SEQ ID NOs: 59-67, and the CAR binds SEQ ID NO: 58.

[0169] DLL3 (Delta-like ligand 3) is an inhibitory Notch ligand that is highly expressed in Small Cell Lung Cancer (SCLC) and other neuroendocrine tumors. In embodiments, various CARs were designed to target DLL3. In embodiments, a CAR comprises at least one of SEQ ID NOs: 119-136, and the CAR binds SEQ ID NO: 118.

[0170] FAP (Fibroblast activation protein), also known as prolyl endopeptidase, is an enzyme that in humans is encoded by the FAP gene. FAP may acts as a tumor promoter via epithelial-mesenchymal transition (EMT) in human oral squamous cell carcinoma. In embodiments, various CARs were designed to target FAP. In embodiments, a CAR comprises at least one of SEQ ID NOs: 138-143 and 319-336, and the CAR binds SEQ ID NO: 137.

[0171] HAVCR1 (Hepatitis A Virus Cellular Receptor 1) is a Protein Coding gene. Diseases associated with HAVCR1 include Hepatitis A. In embodiments, various CARs were designed to target HAVCR1. In embodiments, a CAR comprises at least one of SEQ ID NOs: 179-187, and the CAR binds SEQ ID NO: 178.

[0172] LRRC15 (Leucine-rich repeat-containing protein 15) is also known as LIB and hLIB. LRRC15 is highly expressed in a variety of solid tumors. In embodiments, various CARs were designed to target LRRC15. In embodiments, a CAR comprises at least one of SEQ ID NOs: 189-197, and the CAR binds SEQ ID NO: 188.

[0173] MUC17 (Mucin 17, Cell Surface Associated) is a Protein Coding gene. Diseases associated with MUC17 include Biliary Papillomatosis. In embodiments, various CARs were designed to target MUC17. In embodiments, a CAR comprises at least one of SEQ ID NOs: 244-255, and the CAR binds SEQ ID NO: 243.

[0174] GPC-2 (Glypican-2, GPC2) is a Protein Coding gene. Diseases associated with GPC-2 include Central Corneal Ulcer and Omodysplasia. In embodiments, various CARs were designed to target GPC2. In embodiments, a CAR comprises at least one of SEQ ID NOs: 145-147, and the CAR binds SEQ ID NO: 144.

[0175] The cells, including CAR cells and modified cells, described herein can be derived from a stem cell. The stem cells may be adult stem cells, embryonic stem cells, or non-human stem cells, cord blood stem cells, progenitor cells, bone marrow stem cells, induced pluripotent stem cells, totipotent stem cells, or hematopoietic stem cells. The cells can also be a dendritic cell, a NK-cell, a B-cell, or a T cell selected from the group consisting of inflammatory T lymphocytes, cytotoxic T lymphocytes, regulatory T lymphocytes, and helper T lymphocytes. In embodiments, the cells can be derived from the group consisting of CD4+T-lymphocytes and CD8+T-lymphocytes. Prior to proliferation and genetic modification of the cells described herein, a source of cells can be obtained from a subject through a variety of non-limiting methods. T cells can be obtained from a number of non-limiting sources, including peripheral blood mononuclear cells, bone marrow, lymph node tissue, cord blood, thymus tissue, tissue from a site of infection, ascites, pleural effusion, spleen tissue, and tumors. In embodiments, any number of T cell lines available and known to those skilled in the art, can be used. In embodiments, the cells can be derived from a healthy donor, from a patient diagnosed with cancer or from a patient diagnosed with an infection. In embodiments, the cells are part of a mixed population of cells which present different phenotypic characteristics.

[0176] The term “stem cell” refers to any type of cell which has the capacity for self-renewal and the ability to differentiate into other kind(s) of cell. For example, a stem cell gives rise either to two daughter stem cells (as occurs in vitro with embryonic stem cells in culture) or to one stem cell and a cell that undergoes differentiation (as occurs e.g. in hematopoietic stem cells, which give rise to blood cells). Different categories of stem cells may be distinguished on the basis of their origin and/or on the extent of their capacity for differentiation into other types of cell. Stem cells can include embryonic stem (ES) cells (i.e., pluripotent stem cells), somatic stem cells, induced pluripotent stem cells, and any other types stem cells.

[0177] Pluripotent embryonic stem cells can be found in the inner cell mass of a blastocyst and have high innate capacity for differentiation. For example, pluripotent embryonic stem cells have the potential to form any type of cell in the body. When grown in vitro for long periods of time, ES cells maintain pluripotency, and progeny cells retain the potential for multilineage differentiation.

[0178] Somatic stem cells can include fetal stem cells (from the fetus) and adult stem cells (found in various tissues, such as bone marrow). Somatic stem cells have been regarded as having a capacity for differentiation lower than that of the pluripotent ES cells. The capacity of fetal stem cells for differentiation is greater than that of adult stem cells. Somatic stem cells apparently differentiate into only a limited number of different types of cells and have been described as multipotent. Tissue-specific stem cells normally give rise to only one type of cell. In contrast, embryonic stem cells can differentiate into blood stem cells (e.g., Hematopoietic stem cells (HSCs)), which can further differentiate into various blood cells (e.g., red blood cells, platelets, white blood cells, etc.).

[0179] Induced pluripotent stem cells (iPS cells or iPSCs) can include a type of pluripotent stem cell artificially derived from a non-pluripotent cell (e.g., an adult somatic cell) by inducing expression of specific genes. Induced pluripotent stem cells are similar to naturally occurring pluripotent stem cells, such as embryonic stem (ES) cells, in many aspects, such as the expression of certain stem cell genes and proteins, chromatin methylation patterns, doubling time, embryoid body formation, teratoma formation, viable chimera formation, and potency and differentiability. Induced pluripotent cells can be isolated from adult stomach, liver, skin cells, and blood cells.

[0180] In embodiments, the CAR cells, the modified cell, or the cell is a T cell, a NK cell, a macrophage or a dendritic cell. For example, the CAR cells, the modified cell, or the cell is a T cell.

[0181] In embodiments, the antigen binding molecule is a T Cell Receptor (TCR). In embodiments, the TCR is modified TCR. In embodiments, the TCR is derived from spontaneously occurring tumor-specific T cells in patients. In embodiments, the TCR binds a tumor antigen. In embodiments, the tumor antigen comprises CEA, gp100, MART-1, p53, MAGE-A3, or NY-ESO-1. In embodiments, the TCR comprises TCRγ and TCRδ chains or TCRα and TCR chains. In embodiments, a T cell clone that expresses a TCR with high affinity for the target antigen is isolated. In embodiments, tumor-infiltrating lymphocytes (TILs) or peripheral blood mononuclear cells (PBMCs) is cultured in the presence of antigen-presenting cells (APCs) pulsed with a peptide representing an epitope known to elicit a dominant T cell response when presented in the context of a defined HLA allele. High-affinity clones can then be selected on the basis of MHC-peptide tetramer staining and/or the ability to recognize and lyse target cells pulsed with low titrated concentrations of cognate peptide antigen. After the clone has been selected, the TCRα and TCRβ chains or TCRγ and TCRδ chains are identified and isolated by molecular cloning. For example, for TCRα and TCRβ chains, the TCRα and TCRβ gene sequences are then used to generate an expression construct that ideally promotes stable, high-level expression of both TCR chains in human T cells. The transduction vehicle (e.g., a gammaretrovirus or lentivirus) can then be generated and tested for functionality (antigen specificity and functional avidity) and used to produce a clinical lot of the vector. An aliquot of the final product is then used to transduce the target T cell population (generally purified from patient PBMCs), which is expanded before infusion into the subject.

[0182] In embodiments, the binding element of the CAR can include any antigen binding moiety that when bound to its cognate antigen, affects a tumor cell for example, it kills the tumor cell, inhibits the growth of the tumor cell, or promotes death of the tumor cell.

[0183] The nucleic acid sequences coding for the desired molecules can be obtained using recombinant methods known in the art, such as, for example by screening libraries from cells expressing the gene, by deriving the gene from a vector known to include the same, or by isolating directly from cells and tissues containing the same, using standard techniques. Alternatively, the gene of interest can be produced synthetically, rather than cloned.

[0184] The embodiments of the present disclosure further relate to vectors in which a DNA of the present disclosure is inserted. Vectors derived from retroviruses such as the lentivirus are suitable tools to achieve long-term gene transfer since they allow long-term, stable integration of a transgene and its propagation in daughter cells. Lentiviral vectors have the added advantage over vectors derived from onco-retroviruses such as murine leukemia viruses in that they can transduce non-proliferating cells, such as hepatocytes. They also have the added advantage of low immunogenicity.

[0185] Viruses can be used to deliver nucleic acids into a cell in vitro and in vivo (in a subject). Examples of viruses useful for delivery of nucleic acids into cells include retrovirus, adenovirus, herpes simplex virus, vaccinia virus, and adeno-associated virus.

[0186] There also exist non-viral methods for delivering nucleic acids into a cell, for example, electroporation, gene gun, sonoporation, magnetofection, and the use of oligonucleotides, lipoplexes, dendrimers, and inorganic nanoparticles.

[0187] The expression of natural or synthetic nucleic acids encoding CARs is typically achieved by operably linking a nucleic acid encoding the CAR polypeptide or portions thereof to one or more promoters and incorporating the construct into an expression vector. The vectors can be suitable for replication and integration into eukaryotes. Typical cloning vectors contain transcription and translation terminators, initiation sequences, and promoters useful for regulation of the expression of the desired nucleic acid sequence.

[0188] Additional information related to expression of synthetic nucleic acids encoding CARs and gene transfer into mammalian cells is provided in U.S. Pat. No. 8,906,682, incorporated by reference in its entirety.

[0189] Pharmaceutical compositions of the present disclosure may be administered in a manner appropriate to the disease to be treated (or prevented). The quantity and frequency of administration will be determined by such factors as the condition of the patient, and the type and severity of the patient's disease, although appropriate dosages may be determined by clinical trials.

[0190] When “an immunologically effective amount”, “an anti-tumor effective amount”, “a tumor-inhibiting effective amount”, or “therapeutic amount” is indicated, the precise amount of the compositions of the present disclosure to be administered can be determined by a physician with consideration of individual differences in age, weight, tumor size, extent of infection or metastasis, and condition of the patient (subject). It can be stated that a pharmaceutical composition comprising the T cells described herein may be administered at a dosage of 10⁴ to 10⁹ cells/kg body weight, preferably 10⁹ to 10⁶ cells/kg body weight, including all integer values within those ranges. T cell compositions may also be administered multiple times at these dosages. The cells can be administered by using infusion techniques that are commonly known in immunotherapy (see, e.g., Rosenberg et al., New Eng. J. of Med. 319:1676, 1988). The optimal dosage and treatment regime for a particular patient can readily be determined by one skilled in the art of medicine by monitoring the patient for signs of disease and adjusting the treatment accordingly. In embodiments, it may be desired to administer activated T cells to a subject and then subsequently redraw the blood (or have apheresis performed), collect the activated and expanded T cells, and reinfuse the patient with these activated and expanded T cells. This process can be carried out multiple times every few weeks. In embodiments, T cells can be activated from blood draws of from 10 cc to 400 cc. In embodiments, T cells are activated from blood draws of 20 cc, 30 cc, 40 cc, 50 cc, 60 cc, 70 cc, 80 cc, 90 cc, or 100 cc. Not to be bound by theory, using this multiple blood draw/multiple reinfusion protocols, certain populations of T cells may be selected.

[0191] The administration of the pharmaceutical compositions described herein may be carried out in any convenient manner, including by aerosol inhalation, injection, ingestion, transfusion, implantation or transplantation. The compositions described herein may be administered to a patient subcutaneously, intradermally, intratumorally, intranodally, intramedullary, intramuscularly, by intravenous (i. v.) injection, or intraperitoneally. In embodiments, the T cell compositions of the present disclosure are administered to a patient by intradermal or subcutaneous injection. In embodiments, the T cell compositions of the present disclosure are preferably administered by i.v. injection. The compositions of T cells may be injected directly into a tumor, lymph node, or site of infection. In embodiments of the present disclosure, cells activated and expanded using the methods described herein, or other methods known in the art where T cells are expanded to therapeutic levels, are administered to a patient in conjunction with (e.g., before, simultaneously or following) any number of relevant treatment modalities, including but not limited to treatment with agents such as antiviral therapy, cidofovir and interleukin-2, Cytarabine (also known as ARA-C) or natalizumab treatment for MS patients or efalizumab treatment for psoriasis patients or other treatments for PML patients. In further embodiments, the T cells of the present disclosure may be used in combination with chemotherapy, radiation, immunosuppressive agents, such as cyclosporin, azathioprine, methotrexate, mycophenolate, and FK506, antibodies, or other immunoablative agents such as CAM PATH, anti-CD3 antibodies or other antibody therapies, cytoxin, fludaribine, cyclosporin, FK506, rapamycin, mycophenolic acid, steroids, FR901228, cytokines, and irradiation. These drugs inhibit either the calcium dependent phosphatase calcineurin (cyclosporine and FK506) or inhibit the p70S6 kinase that is important for growth factor induced signaling (rapamycin). (Liu et al., Cell 66:807-815, 1991; Henderson et al., Immun 73:316-321, 1991; Bierer et al., Curr. Opin. Immun 5:763-773, 1993; Isoniemi (supra)). In embodiments, the cell compositions of the present disclosure are administered to a patient in conjunction with (e.g., before, simultaneously or following) bone marrow transplantation, T cell ablative therapy using either chemotherapy agents such as, fludarabine, external-beam radiation therapy (XRT), cyclophosphamide, or antibodies such as OKT3 or CAMPATH. In embodiments, the cell compositions of the present disclosure are administered following B-cell ablative therapy such as agents that react with CD20, e.g., Rituxan. For example, subjects may undergo standard treatment with high dose chemotherapy followed by peripheral blood stem cell transplantation. In embodiments, following the transplant, subjects receive an infusion of the expanded immune cells of the present disclosure. In embodiments, expanded cells are administered before or following surgery.

[0192] The dosage of the above treatments to be administered to a patient will vary with the precise nature of the condition being treated and the recipient of the treatment. The scaling of dosages for human administration can be performed according to art-accepted practices by a physician depending on various factors.

[0193] Additional information on the methods of cancer treatment using engineered or modified T cells is provided in U.S. Pat. No. 8,906,682, incorporated by reference in its entirety.

[0194] In embodiments, the population of cells described herein is used in autologous CAR T cell therapy. In embodiments, the CAR T cell therapy is allogenic CAR T cell therapy, TCR T cell therapy, and NK cell therapy.

[0195] Embodiments relate to an in vitro method for preparing modified cells. The method includes obtaining a sample of cells from the subject. For example, the sample can include T cells or T cell progenitors. The method can further include transfecting the cells with a DNA encoding at least a CAR, culturing the population of CAR cells ex vivo in a medium that selectively enhances proliferation of CAR-expressing T cells.

[0196] The sample can be a cryopreserved sample. In embodiments, the sample of cells is from umbilical cord blood or a peripheral blood sample from the subject. In embodiments, the sample of cells is obtained by apheresis or venipuncture. In embodiments, the sample of cells is a subpopulation of T cells.

[0197] Embodiments of the present disclosure relate to treating cancer using Chimeric Antigen Receptor (CAR) cells using a molecule associated with a gene fusion. Embodiments relate to an isolated nucleic acid sequence encoding a chimeric antigen receptor (CAR), wherein the CAR comprises an extracellular domain, a transmembrane domain, and an intracellular domain, wherein the extracellular domain binds a gene fusion neoantigen.

[0198] As used herein, the term “gene fusion” refers to the fusion of at least a portion of a gene to at least a portion of an additional gene. The gene fusion need not include entire genes or exons of genes. In some instances, gene fusion is associated with alterations in cancer. A gene fusion product refers to a chimeric genomic DNA, a chimeric messenger RNA, a truncated protein or a chimeric protein resulting from a gene fusion. The gene fusion product can be detected by various methods described in U.S. Pat. No. 9,938,582, which is incorporated herein by reference. A “gene fusion neoantigen” refers to a truncated protein or a chimeric protein that results from a gene fusion. In embodiments, an epitope of a gene fusion neoantigen can include a part of the gene fusion neoantigen or an immunogenic part of another antigen caused by the gene fusion. In embodiments, the gene fusion neoantigen interacts with, or is a part of the cell membrane. In embodiments, the gene fusion neoantigen is associated with tumor or cancer.

[0199] In embodiments, detection of mRNA and protein expression levels of the target molecules in human cells may be performed using experimental methods such as qPCR and FACS. Further, target molecules specifically expressed in the corresponding tumor cells with very low expression or undetectable expression in normal tissue cells may be identified.

[0200] In embodiments, In Vitro Killer Assay as well as killing experiment of CAR T cells co-cultured with antigen-positive cells can be performed. CAR T cells can exhibit a killing effect on the corresponding antigen-positive cells, a decrease in the number of corresponding antigen-positive cells co-cultured with CAR T cells, and an increase in the release of IFNγ, TNFα, etc. as compared to control cells that do not express the corresponding antigen.

[0201] In embodiments, In Vivo Killer Assay can be performed. For example, mice can be transplanted with corresponding tumor cells expressing an antigen, and transfused with CAR T cells that targets the antigen on the tumor cells. A decrease in mouse tumors and mouse blood IFNγ, TNFα, and other signals can be defected after the transfusion of the CAR T cells.

[0202] Embodiments relate to a method of eliciting and/or enhancing T cell response in a subject having a solid tumor or treating a solid tumor in the subject, the method comprising administering an effective amount of T cells comprising the CAR described herein. In embodiments, the intracellular domain of the CAR comprises a co-stimulatory signaling region that comprises an intracellular domain of a co-stimulatory molecule selected from the group consisting of CD27, CD28, 4-1BB, OX40, CD30, CD40, PD-1, ICOS, lymphocyte function-associated antigen-1 (LFA-1), CD2, CD7, LIGHT, NKG2C, B7-H3, and any combination thereof. In embodiments, the intracellular domain comprises a CD3 zeta signaling domain.

[0203] Embodiments relate to a vector comprising the isolated nucleic acids described herein.

[0204] Embodiments relate to an isolated cell comprising the isolated nucleic acid sequence described herein. Embodiments relate to a composition comprising a population of cells comprising the CAR described herein. The population of cells can be a population of T cells. Embodiments relate to a CAR encoded by the isolated nucleic acid sequence described herein. Embodiments relate to a method of eliciting and/or enhancing T cell response in a subject or treating a tumor of the subject, the method comprising: administering an effective amount of T cell comprising the CAR described herein.

[0205] In embodiments, the CAR molecules described herein comprise one or more complementarity-determining regions (CDRs) for binding an antigen of interest. CDRs are part of the variable domains in immunoglobulins and T cell receptors for binding a specific antigen. There are three CDRs for each variable domain. Since there is a variable heavy domain and a variable light domain, there are six CDRs for binding an antigen. Further since an antibody has two heavy chains and two light chains, an antibody has twelve CDRs altogether for binding antigens. In embodiments, the CAR molecules comprise one or more CDRs of FCRL1, MSLN, GPC-3, CD205, ALPP, and CD70.

[0206] The present disclosure describes modified cells that include one or more different antigen binding domains. The modified cells can include at least two different antigen binding domains: a first antigen binding domain for expanding and/or maintaining the genetically modified cells, and a second antigen binding domain for killing a target cell, such as a tumor cell. For example, the first antigen binding domain binds a surface marker, such as a cell surface molecule of a white blood cell (WBC) (e.g., CD19), and the second antigen binding domain binds a target antigen on tumor cells. In embodiments, the cell surface molecule is a surface antigen of a WBC. In embodiments, the target antigen on tumor cells comprise one or more of FCRL1, MSLN, GPC-3, CD205, ALPP, and CD70. The at least two antigen binding domains may be located on the same or different modified cells. For example, the modified cells can include a modified cell including a CAR binding CD19, a modified cell including a CAR binding to ACPP, a modified cell including a CAR binding CD19 and ACPP, and/or a modified cell including two CARs that separately binds CD19 and ACPP. In embodiments, the modified cells may be used to treat a subject having cancer.

[0207] FCRL1 (Fc receptor-like protein 1), also known as CD307a, contains two immunoreceptor tyrosine activation motifs and can act as an activated co-receptor in B cells. FCRL1 is mainly expressed in normal lymphoid tissues, especially B cells, while it is not expressed in other normal tissues. FCRL1 is highly expressed in many cancer tissues, such as colorectal cancer, breast cancer, and ovarian cancer. FCRL1 is selectively expressed on the surface of CD19+ mature B cells. Through RT-PCR, it was found that FCRL1 began to be expressed in pre-B cells, the expression level was higher in naïve and memory B cells, and the expression level was low in the pre-germinal center (pre-GC), GC B cells, and plasma cell populations. FCRL1 is highly expressed in both B cells and cancer tissues. In embodiments, FCRL1CAR is designed to recognize the antigens of B cells and cancer cells at the same time and perhaps replace CoupledCAR® to achieve the same effect. Thus, in embodiments, FCRL1 can be used as the target for CoupledCAR® system described in PCT Publication NOs: WO2020146743 and WO2020106843, which are incorporated herein by reference in their entirety. FCRL1CAR T can inhibit the growth of tumor cells expressing FCRL1 and stimulate the proliferation of CAR T cells due to its binding B cells.

[0208] In embodiments, the modified cells described herein includes a CAR molecule comprising at least two different antigen binding domains. The CAR molecule can be a bispecific CAR molecule. For example, the two antigen binding domains can be on the same CAR molecule, on different CAR molecules, or on a CAR molecule and T cell receptor (TCR). A single CAR can include at least two different antigen binding domains, or the two different antigen binding domains are each on a separate CAR molecule. The at least two different antigen binding domains can be on the same CAR molecule or different CAR molecules, but in the same modified cell. Moreover, the at least two different antigen binding domains can be on a CAR molecule and a T cell receptor in the same modified cell. In embodiments, the bispecific CAR molecule can include a binding domain binding an antigen of WBC (e.g., CD19) and a binding domain binding a solid tumor antigen. In embodiments, the bispecific CAR molecule can include two binding domains binding two different solid tumor antigens.

[0209] In embodiments, the at least two different antigen binding domains are on different CAR molecules which are expressed by different modified cells. Further, the one or more different antigen binding domains are on a CAR molecule and a T cell receptor, which are expressed by different modified cells.

[0210] The present disclosure is further described by reference to the following exemplary embodiments and examples. These exemplary embodiments and examples are provided for purposes of illustration only and are not intended to be limiting unless otherwise specified. Thus, the present disclosure should in no way be construed as being limited to the following exemplary embodiments and examples, but rather, should be construed to encompass any and all variations which become evident as a result of the teaching provided herein.

### Exemplary Embodiments

[0211] The following are exemplary embodiments.

[0212] 1. An isolated nucleic acid encoding a chimeric antigen receptor (CAR), wherein the CAR comprises an extracellular domain, a transmembrane domain, and an intracellular domain, wherein the extracellular domain binds an antigen of a tumor (e.g., solid tumor).

[0213] 2. The isolated nucleic acid of embodiment 1, wherein the extracellular domain binds FCRL1.

[0214] 3. The isolated nucleic acid of embodiment 1 or 2, wherein the extracellular domain binds human FCRL1.

[0215] 4. The isolated nucleic acid of any one of embodiments 1-3, wherein the CAR binds amino acid sequence SEQ ID NO: 337.

[0216] 5. A method of eliciting and/or enhancing T-cell response in a subject having the solid tumor or treating the solid tumor of the subject, the method comprising administering an effective amount of T cells comprising the isolated nucleic acid of any one of embodiments 2-4.

[0217] 6. The isolated nucleic acid or the method of any one of embodiments 1-5, wherein the tumor is associated with colorectal cancer, breast cancer, ovarian cancer.

[0218] 7. The isolated nucleic acid of embodiment 1, wherein the extracellular domain binds MSLN.

[0219] 8. The isolated nucleic acid of embodiment 1 or 7, wherein the extracellular domain binds human MSLN.

[0220] 9. The isolated nucleic acid of any one of embodiments 1, 7, or 8 wherein the CAR comprises one of the amino acid sequences SEQ ID NOs: 23-28 and 198-230.

[0221] 10. A method of eliciting and/or enhancing T-cell response in a subject having a solid tumor or treating a solid tumor in the subject, the method comprising administering an effective amount of T cells comprising the isolated nucleic acid of any one of embodiments 1 or 7-9.

[0222] 11. The isolated nucleic acid or the method of any one of embodiments 1 or 7-10, wherein the tumor is associated with pancreatic cancer or lung cancer.

[0223] 12. The isolated nucleic acid of embodiment 1, wherein the extracellular domain binds GPC-3.

[0224] 13. The isolated nucleic acid of embodiment 1 or 12, wherein the extracellular domain binds human GPC-3.

[0225] 14. The isolated nucleic acid of any one of embodiments 1, 12, or 13, wherein the CAR comprises one of the amino acid sequences SEQ ID NOs: 16-21 and 148-177.

[0226] 15. A method of eliciting and/or enhancing T-cell response in a subject having the solid tumor or treating the solid tumor of the subject, the method comprising administering an effective amount of T cells comprising the isolated nucleic acid of any one of embodiments 1 or 12-14.

[0227] 16. The isolated nucleic acid or the method of any one of embodiments 1 or 12-15, wherein the tumor is associated with liver cancer.

[0228] 17. The isolated nucleic acid of embodiment 1, wherein the extracellular domain binds ALPP.

[0229] 18. The isolated nucleic acid of embodiment 1 or 17, wherein the extracellular domain binds human ALPP.

[0230] 19. The isolated nucleic acid of any one of embodiments 1, 17, or 18, wherein the CAR comprises one of the amino acid sequences SEQ ID NOs: 42-44 and 68-84.

[0231] 20. A method of eliciting and/or enhancing T cell response in a subject having a solid tumor or treating a solid tumor in the subject, the method comprising administering an effective amount of T cells comprising the isolated nucleic acid of any one of embodiments 17-19.

[0232] 21. The isolated nucleic acid or the method of any one of suitable embodiments 1 and 17-20, wherein the tumor is associated with endometrial cancer and/or ovarian cancer.

[0233] 22. The isolated nucleic acid of embodiment 1, wherein the extracellular domain binds CD70, ROR1, ACPP, ADAM12, or CLDN18.2.

[0234] 23. The isolated nucleic acid of embodiment 1 or 22, wherein the extracellular domain binds human CD70, human ROR1, human ACPP, human ADAM12, or CLDN18.2.

[0235] 24. The isolated nucleic acid of any one of embodiments 1, 22, or 23, wherein
[0236] the extracellular domain binds CD70 and the CAR comprises one of the amino acid sequences SEQ ID NOs: 2, 3, 85-108, and 271-297;
[0237] the extracellular domain bind ROR1 and the CAR comprises one of the amino acid sequences SEQ ID NOs: 35, 36, 257, 258, 260, 261, 263, 264, 266, 267, 269, and 270.
[0238] the extracellular domain binds ACPP, and the CAR comprises one of the amino acid sequences SEQ ID NOs: 50 and 51;
[0239] the extracellular domain binds ADAM12, and the CAR comprises one of the amino acid sequences SEQ ID NO: 53, 54, 57, and 57; or the extracellular domain binds CLDN18.2, and the CAR comprises one of the amino acid sequences 47 and 48.

[0240] 25. A method of eliciting and/or enhancing T cell response in a subject having the solid tumor or treating the solid tumor of the subject, the method comprising administering an effective amount of T cells comprising the isolated nucleic acid of any one of embodiments 1 or 22-24.

[0241] 26. The isolated nucleic acid or the method of any one of embodiments 1 and 22-25, wherein the tumor is associated with kidney cancer.

[0242] 27. The isolated nucleic acid of embodiment 1, wherein the extracellular domain binds CLDN6.

[0243] 28. The isolated nucleic acid of embodiment 1 or 27, wherein the extracellular domain binds human CLDN6.

[0244] 29. The isolated nucleic acid of any one of embodiments 1, 27, or 28, wherein the CAR comprises one of the amino acid sequences SEQ ID NOs: 12-14, and 115-117.

[0245] 30. A method of eliciting and/or enhancing T cell response in a subject having the solid tumor or treating the solid tumor of the subject, the method comprising administering an effective amount of T cells comprising the isolated nucleic acid of any one of embodiments 1 or 27-29.

[0246] 31. The isolated nucleic acid or the method of any one of embodiments 1 and 27-30, wherein the tumor is associated with liver cancer.

[0247] 32. The isolated nucleic acid of embodiment 1, wherein the extracellular domain binds CD205.

[0248] 33. The isolated nucleic acid of embodiment 1 or 32, wherein the extracellular domain binds human CD205.

[0249] 34. The isolated nucleic acid of any one of embodiments 1, 32, or 33, wherein the CAR comprises one of the amino acid sequences SEQ ID NOs: 8-10, 110, 111, 113, and 114.

[0250] 35. A method of eliciting and/or enhancing T cell response in a subject having the solid tumor or treating the solid tumor of the subject, the method comprising administering an effective amount of T cells comprising the isolated nucleic acid of any one of embodiments 1 or 32-34.

[0251] 36. The isolated nucleic acid or the method of any one of embodiments 1 and 32-35, wherein the tumor is associated with breast cancer, pancreatic cancer, and bladder cancer.

[0252] 37. A method of implementing CoupledCAR® system described in PCT Publication NOs: WO2020146743 and WO2020106843, wherein the CAR comprises at least one scFv listed in Tables 2-4.

[0253] 38. An isolated nucleic acid encoding a chimeric antigen receptor (CAR), wherein the CAR comprises an extracellular domain, a transmembrane domain, and an intracellular domain, wherein the extracellular domain binds a gene fusion neoantigen, and optionally wherein the gene fusion comprises a fusion of at least a portion of a first gene to at least a portion of a second gene and wherein optionally the gene fusion neoantigen is associated with a tumor.

[0254] 39. The isolated nucleic acid or the method of any one of embodiments 1-38, wherein the intracellular domain comprises a co-stimulatory signaling region comprising an intracellular signaling domain of CD27, CD28, 4-1BB, OX40, CD30, CD40, PD-1, ICOS, lymphocyte function-associated antigen-1 (LFA-1), CD2, CD7, LIGHT, NKG2C, B7-H3, or any combination thereof.

[0255] 40. The isolated nucleic acid or the method of any one of embodiments 1-39, wherein the intracellular domain comprises a CD3 zeta signaling domain.

[0256] 41. A vector comprising the isolated nucleic acid of any one of embodiments 1-40.

[0257] 42. A CAR encoded by the isolated nucleic acid or vector of any one embodiments 1-41.

[0258] 43. A modified cell comprising the isolated nucleic acid, the vector, or the CAR of any one of embodiments 1-42, optionally the modified cell comprises a modified T cell.

[0259] 44. A population of modified cells comprising the modified cell of embodiment 43, optionally wherein the population of modified cells comprises modified T cells.

[0260] 45. A composition comprising the isolated nucleic acid, the CAR, the vector, the modified, or the population of modified cells of any one of embodiments 1-44, optionally the composition comprises a population of modified T cells.

[0261] 46. A method of eliciting and/or enhancing T cell response in a subject having a solid tumor or treating a solid tumor of a subject, the method comprising administering an effective amount of T cells comprising the isolated nucleic acid, vector, the CAR of any one of embodiments 1-42, an effective amount of the modified T cells or the population of modified T cells of embodiment 43 or 44, or an effective amount of the composition of embodiment 45.

[0262] 47. The modified cell, the population of modified cells, the composition comprising the modified cells or the population of modified cells, or the method of any one of embodiments 43-45, wherein the modified cell comprises or is a T cell derived from a healthy donor or a subject having cancer.

[0263] 48. The modified cell, the population of modified cells, the composition comprising the modified cells or the population of modified cells, or the method of any one of embodiments 43-47, wherein the modified cell further comprises a dominant negative form of a receptor associated with an immune checkpoint inhibitor, and optionally the modified cell is a modified T cell.

[0264] 49. The modified cell, the population of modified cells, the composition comprising the modified cells or the population of modified cells, or the method of embodiments 48, wherein the immune checkpoint inhibitor is selected from the group consisting of programmed death 1 (PD-1), cytotoxic T lymphocyte antigen-4 (CTLA-4), B- and T-lymphocyte attenuator (BTLA), T cell immunoglobulin mucin-3 (TIM-3), lymphocyte-activation protein 3 (LAG-3), T cell immunoreceptor with Ig and ITIM domains (TIGIT), leukocyte-associated immunoglobulin-like receptor 1 (LAIRD, natural killer cell receptor 2B4 (2B4), and CD 160.

[0265] 50. The isolated nucleic acid, modified cell, optionally modified T cell, or the method of embodiment 48 or 49, wherein immune checkpoint inhibitor is modified PD-1.

[0266] 51. The isolated nucleic acid, modified cell, optionally modified T cell, or the method of embodiment 49 or 50, wherein the modified PD-1 lacks a functional PD-1 intracellular domain for PD-1 signal transduction, interferes with a pathway between PD-1 of a human T cell of the human cells and PD-L1 of a certain cell, comprises or is a PD-1 extracellular domain or a PD-1 transmembrane domain, or a combination thereof, or a modified PD-1 intracellular domain comprising a substitution or deletion as compared to a wild-type PD-1 intracellular domain, or comprises or is a soluble receptor comprising a PD-1 extracellular domain that binds PD-L1 of a certain cell.

[0267] 52. The isolated nucleic acid, modified cell, optionally modified T cell, or the method of any one of embodiments 49-51, wherein an inhibitory effect of PD-L1 on cytokine production of the human T cells of the population is less than an inhibitory effect of PD-L1 on cytokine production of human T cells that do not comprise at least a part of the nucleic acid sequence that encodes the modified PD-1.

[0268] 53. The isolated nucleic acid, modified cell, optionally modified T cell, or the method of one of embodiments 1-52, wherein the modified cell is a modified T cell that is engineered to express and secrete a therapeutic agent, and optionally wherein the therapeutic agent is a cytokine or a small protein.

[0269] 54. The modified T cell or the method of embodiment 53, wherein the therapeutic agent is or comprises IFN-γ.

[0270] 55. The modified T cell or the method of embodiment 53 or 54, wherein the therapeutic agent is or comprises at least one of IL-6, IFN-γ, IL-17, and CCL19.

[0271] 56 The modified T cell or the method of any one of embodiments 53-55, wherein the therapeutic agent is or comprises IL-15 or IL-12, or a combination thereof.

[0272] 57. The modified T cell or the method of any one of embodiments 53-56, wherein the therapeutic agent is or comprises a recombinant or native cytokine.

[0273] 58. The modified T cell or the method of embodiment 53, wherein the therapeutic agent comprises a FC fusion protein associated with a small protein.

[0274] 59. The modified T cell or the method of embodiment 53 or 58, wherein the cytokine is or comprises IL-12, IL-15, IL-6 or IFN-γ.

[0275] 60. The modified T cell or the method of any one of embodiments 53-59, wherein the therapeutic agent is regulated by Hif1a, NFAT, FOXP3, and/or NFkB.

[0276] 61. The modified T cell or the method of any one of embodiments 53-60, wherein the therapeutic agent is or comprises two or more recombinant or native cytokines are connected via 2A or IRES component.

[0277] 62. The isolated nucleic acid, modified cell, or the method of any one of embodiments 1-61, wherein the modified cell, optionally modified T cell, comprises a first targeting vector and a second targeting vector, the first targeting vector comprising a nucleic acid encoding a CAR binding a blood antigen and a therapeutic agent, and the second targeting vector comprises a nucleic acid encoding a CAR binding a solid tumor antigen and a dominant negative form of an immune checkpoint molecule.

[0278] 63. The isolated nucleic acid, modified cell, or the method of one of embodiments 1-62, wherein the modified cell, optionally modified T cell, comprises a first targeting vector and a second targeting vector, the first targeting vector comprising a nucleic acid encoding a CAR binding CD19 and the therapeutic agent, and the second targeting vector comprises a nucleic acid encoding a CAR biding UPK2, ACPP, SIGLEC15 or KISS1R and a dominant negative form of PD-1.

[0279] 64. The isolated nucleic acid, modified cell, or the method of one of embodiments 1-63, wherein the modified cell, optionally modified T cell, comprises a first targeting vector and a second targeting vector, the first targeting vector comprising a nucleic acid encoding a CAR binding a blood antigen, and the second targeting vector comprises a nucleic acid encoding a CAR biding solid tumor antigen.

[0280] 65. The isolated nucleic acid, modified cell, or the method of one of embodiments 1-63, wherein the modified cell, optionally modified T cell, comprises a first targeting vector and a second targeting vector, the first targeting vector comprising a nucleic acid encoding a CAR binding a B cell antigen, and the second targeting vector comprises a nucleic acid encoding a CAR biding solid tumor antigen.

[0281] 66. The isolated nucleic acid, modified cell, or the method of one of embodiments 1-65, wherein the modified cell, optionally modified T cell, comprises a nucleic acid encoding hTERT, SV40LT, or a combination thereof.

[0282] 67. The isolated nucleic acid, modified T cell, or the method of embodiment 66, wherein the modified T cell is more proliferable than T cells without nucleic acid sequence.

[0283] 68. The isolated nucleic acid, modified T cell, or the method of embodiment 67, wherein the modified T cell remains functions of normal T cells/CAR T cells such as cell therapy functions.

[0284] 69. The isolated nucleic acid, modified T cell or the method of any one of embodiments 66-68, wherein the T cell comprises a CAR and is cultured in the presence of an agent that is recognized by the extracellular domain of the CAR.

[0285] 70. The isolated nucleic acid, modified cell, optionally modified T cell, or the method of any one of embodiments 1-69, wherein modified cell, optionally modified T cell, comprises genomic integration of the nucleic acid sequence encoding hTERT, a nucleic acid encoding SV40LT, or a combination thereof, and optionally wherein the cell comprises constitutive expression of hTERT, SV40LT, or a combination thereof.

[0286] 71. The isolated nucleic acid, modified T cell, optionally modified T cell, or the method of any one of embodiments 1-70, wherein expression of hTERT, SV40LT, or a combination thereof, is regulated by an inducible expression system such as a rtTA-TRE system.

[0287] 72. The isolated nucleic acid, modified T cell or the method of any one of embodiments 1-71, wherein modified T cell comprises a nucleic acid sequence encoding a suicide gene such as a an HSV-TK system.

[0288] 73. The isolated nucleic acid, modified cell, optionally modified T cell, or the method of any one of embodiments 1-72, wherein the modified cell, optionally modified T cell, has a reduced graft-versus-host disease (GVHD) response in a bioincompatible human recipient as compared to the GVHD response of the primary human T cell.

[0289] 74. The isolated nucleic acid, modified cell, optionally modified T cell, or the method of any one of embodiments 1-72, wherein the modified cell, optionally modified T cell, has a reduced expression of endogenous TRAC gene.

[0290] 75. The isolated nucleic acid, modified cell, optionally modified T cell, or the method of any one of embodiments 1-72, wherein the CAR comprises a scFv or CAR sequence listed in Table 2.

[0291] 76. A population of cells comprising the modified cells of any one of suitable embodiments 1-75.

[0292] 77. A kit comprising the nucleic acid, the vector, the CAR, the modified cell, the population of modified cells, the composition, and/or the pharmaceutical composition of any one of the embodiments 1-76.

[0293] 78. Use of the nucleic acid, the vector, the CAR, the modified cell, the population of modified cells, the composition, the pharmaceutical composition, the kit, or the method of any one of embodiments 1-77 for use in a method of treating a subject's body by therapy.

[0294] 79. The use of embodiment 78, wherein the subject is a mammal, and optionally wherein the mammal is a human.

[0295] 80. The use of embodiment 78 or 79, wherein the subject is suffering from or diagnosed with cancer.

[0296] 81. The use of any one of embodiments 78-80, wherein the use comprises eliciting and/or enhancing a T cell response in the subject.

[0297] 82. Use of the nucleic acid, the vector, the CAR molecule, the modified cells, the population of modified cells, the compositions, the pharmaceutical compositions, the kit, or the methods of any one of embodiments 1-81 for use in a method of eliciting and/or enhancing a T cell response in a subject.

[0298] 83. The use of embodiment 82, wherein the subject is a mammal, and optionally wherein the mammal is a human.

[0299] 84. The use of embodiment 82 or 83, wherein the subject is suffering from or diagnosed with cancer.

[0300] 85. A polyspecific binding molecule (PBM), wherein the PBM comprises at least a first binding domain binding a T cell and at least a second binding domain comprises a scFv described in Table 2-4.

[0301] 86. A method of treating cancer, the method comprising administering an effective amount of PBM (e.g., BiTE®) of embodiment 85 to a subject having a form of cancer, more information of PBM can be found at ICT's PCT Application NO: PCT/US21/28429, which is incorporated herein by its entity.

[0302] 87. An isolated nucleic acid encoding a polyspecific binding molecule comprising a scFv or a CAR comprising an extracellular domain comprising the scFv, a transmembrane domain, and an intracellular domain, the extracellular domain binds an antigen.

[0303] 88. A CAR comprising an extracellular domain comprising a scFv, a transmembrane domain, and an intracellular domain, the extracellular domain binds an antigen.

[0304] 89. A cell comprising the isolated nucleic acid of embodiment 1 or a CAR of embodiment 87.

[0305] 90. A pharmaceutical composition comprising a population of the cells of embodiment 88.

[0306] 91. A method of cause T cell response in a subject in need thereof and/or treating a tumor of the subject, the method comprising administering an effective amount of the pharmaceutical composition of embodiment 90 to the subject.

[0307] 92. The isolated nucleic acid, CAR, cell, pharmaceutical composition, and the method of any of embodiments 87-91, wherein:
[0308] the antigen is GPC-3 (Glypican-3), a CAR or scFv comprises at least one of SEQ ID NOs: 16-21 and 148-177, and/or the CAR binds SEQ ID NO: 15;
[0309] the antigen is CD70, a CAR or scFv comprises at least one of SEQ ID NOs: 2, 3, 85-108, and 271-297, and/or the CAR binds SEQ ID NO: 1;
[0310] the antigen is CD205, a CAR or scFv comprises at least one of SEQ ID NOs: 5-10 and 109-114, and/or the CAR binds SEQ ID NO: 4;
[0311] the antigen is ADAM12, a CAR or scFv comprises at least one of SEQ ID NOs: 52-57, and/or the CAR binds SEQ ID NO: 37;
[0312] the antigen is ALPP, a CAR or scFv comprises at least one of SEQ ID NOs: 42-44 and 68-84, and/or the CAR binds SEQ ID NO: 41;
[0313] the antigen is Prostatic Acid Phosphatase (PAP), a CAR or scFv comprises at least one of SEQ ID NOs: 49-51;
[0314] the antigen is CLDN18.2, a CAR or scFv comprises at least one of SEQ ID NOs: 46-48 and 298-318, and/or the CAR binds SEQ ID NO: 45;
[0315] the antigen is CLDN6, a CAR or scFv comprises at least one of SEQ ID NOs: 12-14 and 115-117, and/or the CAR binds SEQ ID NO: 11;
[0316] the antigen is MSLN, a CAR or scFv comprises at least one of SEQ ID NOs: 23-28 and 198-230, and/or the CAR binds SEQ ID NO: 22;
[0317] the antigen is MUC16, a CAR or scFv comprises at least one of SEQ ID NOs: 30-32 and 231-242, and/or the CAR binds SEQ ID NO: 29;
[0318] the antigen is ROR1, a CAR or scFv comprises at least one of SEQ ID NOs: 34-36 and 256-270, and/or the CAR binds SEQ ID NO: 33;
[0319] the antigen is ACPP, a CAR or scFv comprises at least one of SEQ ID NO: 49-51;
[0320] the antigen is AFP, a CAR or scFv comprises at least one of SEQ ID NOs: 59-67, and/or the CAR binds SEQ ID NO: 58;
[0321] the antigen is DLL3, a CAR or scFv comprises at least one of SEQ ID NOs: 119-136, and/or the CAR binds SEQ ID NO: 118;
[0322] the antigen is FAP, a CAR or scFv comprises at least one of SEQ ID NOs: 138-143 and 319-336, and/or the CAR binds SEQ ID NO: 137;
[0323] the antigen is HAVCR1, a CAR or scFv comprises at least one of SEQ ID NOs: 179-184, and/or the CAR binds SEQ ID NO: 178; or the antigen is LRRC15, a CAR or scFv comprises at least one of SEQ ID NOs: 189-197, and/or the CAR binds SEQ ID NO: 188.

[0324] 93. The isolated nucleic acid, cell, pharmaceutical composition, and the method of any of embodiments 87-92, wherein the PBM further comprise another binding domain binding CD3, more information about the PBM is provided in PCT Patent Application PCT/US2021/028429, which is incorporated by its entirety.

### EXAMPLES

### Example 1. Construction of CAR T Cells and Assay Thereof

[0325] Lentiviral vectors that encode individual CAR molecules were generated and transfected with T cells, and the expression of CARs was confirmed by flow cytometry assay. Techniques related to cell cultures, construction of cytotoxic T lymphocyte assay may be found in “Control of large, established tumor xenografts with genetically retargeted human T cells containing CD28 and CD137 domains,” PNAS, Mar. 3, 2009, vol. 106 no. 9, 3360-3365 and “Chimeric Receptors Containing CD137 Signal Transduction Domains Mediate Enhanced Survival of T Cells and Increased Antileukemic Efficacy In Vivo,” Molecular Therapy, August 2009, vol. 17 no. 8, 1453-1464, which are incorporated herein by reference in its entirety.

[0326] Primary T cells were transduced with lentivirus including various CARs to establish different CAR T cell lines targeting different antigens listed in Tables 2-4. These cells were obtained from healthy human donors. The lentivirus included nucleic acid sequences encoding CAR molecules, and further included the IRES-mCherry (green) construct, which encodes green fluorescence for confirmation of CAR expression. Techniques related to cell cultures, construction of lentiviral vectors, and flow cytometry may be found in “Treatment of Advanced Leukemia in Mice with mRNA-Engineered T Cells, HUMAN GENE THERAPY 22:1575-1586 (December 2011)”, which is incorporated herein by reference.

[0327] Each type of CAR T cells and the corresponding type of antigen-expressed substrate cells were co-cultured, and CAR T cells' responses induced by the substrate cells were measured. A ratio of E:T 1:1/3:1/10:1/30:1 (i.e., CAR T cells: target tumor cells) of CAR T cells and target tumor cells were co-cultured for 24 hours. The supernatant was collected, and the release of IFN-γ was measured. Among the tested CAR molecules and their corresponding substrate cells, IFN-γ release were observed in multiple combinations of CAR molecules and substrate cells expressing antigens. The sequences of these CARs and the corresponding antigens are listed in Tables 2 and 3. However, IFN-γ release is not obvious when CAR T cells expressing CAR molecules and wild-type substrate cells were co-cultured. Techniques related to cell cultures, construction of cytotoxic T-lymphocyte assay may be found in “Control of large, established tumor xenografts with genetically retargeted human T cells containing CD28 and CD137 domains,” 3360-3365 PNAS Mar. 3, 2009, vol. 106 no. 9, which is incorporated herein by reference.

[0328] CAR T cell killing assays were conducted to measure the effectiveness of CAR T cells expressing the CAR molecules listed in Tables 2 and 3. As compared with non-transduced T cells, these CAR T cells significantly reduced the numbers of antigen-expression cells.

[0329] Subcutaneous tumor models were constructed on mice by subcutaneously injecting tumor cells to mice. These mice inoculated with tumor cells were randomly divided into Mock group infused with no T cells, NT group infused with non-transduced T cells, and CAR T group infused with T cells expressing the CAR molecules listed in Table 2. These three groups of mice were given an equal volume of distilled phosphate buffered saline (DPBS), NT cells, and CAR T cells through the tail vein, respectively. The body weight of the mice was recorded regularly, the size of the tumor was measured, and blood was collected from the marginal venous plexus every week for flow cytometry to detect the proliferation of T cells in the peripheral blood. Techniques related to cell cultures, construction of cytotoxic T lymphocyte assay may be found in “Control of large, established tumor xenografts with genetically retargeted human T cells containing CD28 and CD137 domains,” PNAS, Mar. 3, 2009, vol. 106 no. 9, 3360-3365, which is incorporated herein by reference in its entirety.

Table 2 lists various sequence identifiers and their sequences for establishing various anti-antigen CAR T cells.

| Identifiers | SEQ ID NO |
|---|---|
| CD70 antigen | 1 |
| CD70 binding domain | 2 |
| CD70 CAR | 3 |
| CD205 antigen | 4 |
| CD205 binding domain 2 | 8 |
| CD205 CAR 3 | 9 |
| CD205 CAR 4 | 10 |
| CD205 CAR 9 | 339 |
| CLDN6 antigen | 11 |
| CLDN6 binding domain | 12 |
| CLDN6 binding domain 2 | 13 |
| CLDN6 CAR 1 | 14 |
| GPC3 antigen | 15 |
| GPC3 binding domain 1 | 16 |
| GPC3 CAR 1 | 17 |
| GPC3 CAR 2 | 18 |
| GPC3 binding domain 2 | 19 |
| GPC3 CAR 3 | 20 |
| GPC3 CAR 4 | 21 |
| MSLN antigen | 22 |
| MSLN binding domain 1 | 23 |
| MSLN CAR 1 | 24 |
| MSLN CAR 2 | 25 |
| MSLN binding domain 2 | 26 |
| MSLN CAR 3 | 27 |
| MSLN CAR 4 | 28 |
| MUC16 antigen | 29 |
| MUC16 binding domain | 30 |
| MUC16 CAR 1 | 31 |
| MUC16 CAR 2 | 32 |
| ROR1 antigen | 33 |
| ROR1 binding domain | 34 |
| ROR1 CAR 1 | 35 |
| ROR1 CAR 2 | 36 |
| ADAM12 antigen | 37 |
| ALPP antigen | 41 |
| ALPP binding domain | 42 |
| ALPP CAR 1 | 43 |
| ALPP CAR 1 | 44 |
| CLDN18.2 antigen | 45 |
| CLDN18.2 binding domain | 46 |
| CLDN18.2 CAR 1 | 47 |
| CLDN18.2 CAR 2 | 48 |
| ACPP binding domain | 49 |
| ACPP CAR 1 | 50 |
| ACPP CAR 2 | 51 |

Table 3 lists various sequence identifiers and their sequences for establishing various anti-antigen CAR T cells.

| Identifiers | SE ID NO: |
|---|---|
| ADAM12 binding domain 2 | 52 |
| ADAM12 CAR 3 | 53 |
| ADAM12 CAR 4 | 54 |
| ADAM12 binding domain 3 | 55 |
| ADAM12 CAR 5 | 56 |
| ADAM12 CAR 6 | 57 |
| AFP antigen | 58 |
| AFP binding domain | 59 |
| AFP CAR 1 | 60 |
| AFP CAR 2 | 61 |
| AFP binding domain 2 | 62 |
| AFP CAR 3 | 63 |
| AFP CAR 4 | 64 |
| AFP binding domain 3 | 65 |
| AFP CAR 5 | 66 |
| AFP CAR 6 | 67 |
| ALPP binding domain 2 | 68 |
| ALPP CAR 3 | 69 |
| ALPP CAR 4 | 70 |
| ALPP binding domain 3 | 71 |
| ALPP CAR 5 | 72 |
| ALPP CAR 6 | 73 |
| ALPP binding domain 4 | 74 |
| ALPP CAR 7 | 75 |
| ALPP CAR 8 | 76 |
| ALPP binding domain 5 | 77 |
| ALPP CAR 9 | 78 |
| ALPP CAR 10 | 79 |
| ALPP binding domain 6 | 80 |
| ALPP CAR 11 | 81 |
| ALPP CAR 12 | 82 |
| ALPP CAR 13 | 83 |
| ALPP CAR 14 | 84 |
| CD70 binding domain 2 | 85 |
| CD70 CAR 3 | 86 |
| CD70 CAR 4 | 87 |
| CD70 binding domain 3 | 88 |
| CD70 CAR 5 | 89 |
| CD70 CAR 6 | 90 |
| CD70 binding domain 4 | 91 |
| CD70 CAR 7 | 92 |
| CD70 CAR 8 | 93 |
| CD70 binding domain 5 | 94 |
| CD70 CAR 9 | 95 |
| CD70 CAR 10 | 96 |
| CD70 binding domain 6 | 97 |
| CD70 CAR 11 | 98 |
| CD70 CAR 12 | 99 |
| CD70 binding domain 7 | 100 |
| CD70 CAR 13 | 101 |
| CD70 CAR 14 | 102 |
| CD70 binding domain 8 | 103 |
| CD70 CAR 15 | 104 |
| CD70 CAR 16 | 105 |
| CD70 binding domain 9 | 106 |
| CD70 CAR 17 | 107 |
| CD70 CAR 18 | 108 |
| CD205 antigen 3 | 109 |
| CD205 CAR 5 | 110 |
| CD205 CAR 6 | 111 |
| CD205 antigen 3 | 112 |
| CD205 CAR 5 | 113 |
| CD205 CAR 6 | 114 |
| CLDN6 CAR 2 | 115 |
| CLDN6 CAR 3 | 116 |
| CLDN6 CAR 4 | 117 |
| DLL3 antigen | 118 |
| DLL3 binding domain | 119 |
| DLL3 CAR 1 | 120 |
| DLL3 CAR 2 | 121 |
| DLL3 binding domain 2 | 122 |
| DLL3 CAR 3 | 123 |
| DLL3 CAR 4 | 124 |
| DLL3 binding domain 3 | 125 |
| DLL3 CAR 5 | 126 |
| DLL3 CAR 6 | 127 |
| DLL3 binding domain 4 | 128 |
| DLL3 CAR 7 | 129 |
| DLL3 CAR 8 | 130 |
| DLL3 binding domain 5 | 131 |
| DLL3 CAR 9 | 132 |
| DLL3 CAR 10 | 133 |
| DLL3 binding domain 6 | 134 |
| DLL3 CAR 11 | 135 |
| DLL3 CAR 12 | 136 |
| FAP Antigen | 137 |
| FAP binding domain 1 | 138 |
| FAP CAR 1 | 139 |
| FAP CAR 2 | 140 |
| FAP binding domain 2 | 141 |
| FAP CAR 3 | 142 |
| FAP CAR 4 | 143 |
| GPC2 antigen | 144 |
| GPC2 binding domain | 145 |
| GPC2 CAR 1 | 146 |
| GPC2 CAR 2 | 147 |
| GPC3 binding domain 2 | 148 |
| GPC3 CAR 3 | 149 |
| GPC3 CAR 4 | 150 |
| GPC3 binding domain 3 | 151 |
| GPC3 CAR 5 | 152 |
| GPC3 CAR 6 | 153 |
| GPC3 binding domain 4 | 154 |
| GPC3 CAR 7 | 155 |
| GPC3 CAR 8 | 156 |
| GPC3 binding domain 5 | 157 |
| GPC3 CAR 9 | 158 |
| GPC3 CAR 10 | 159 |
| GPC3 binding domain 6 | 160 |
| GPC3 CAR 11 | 161 |
| GPC3 CAR 12 | 162 |
| GPC3 binding domain 7 | 163 |
| GPC3 CAR 13 | 164 |
| GPC3 CAR 14 | 165 |
| GPC3 binding domain 8 | 166 |
| GPC3 CAR 15 | 167 |
| GPC3 CAR 16 | 168 |
| GPC3 binding domain 9 | 169 |
| GPC3 CAR 17 | 170 |
| GPC3 CAR 18 | 171 |
| GPC3 binding domain 10 | 172 |
| GPC3 CAR 19 | 173 |
| GPC3 CAR 20 | 174 |
| GPC3 binding domain 11 | 175 |
| GPC3 CAR 21 | 176 |
| GPC3 CAR 22 | 177 |
| HAVCR1 antigen | 178 |
| HAVCR1 binding domain | 179 |
| HAVCR1 CAR 1 | 180 |
| HAVCR1 CAR 2 | 181 |
| HAVCR1 binding domain 2 | 182 |
| HAVCR1 CAR 3 | 183 |
| HAVCR1 CAR 4 | 184 |
| LRRC15 antigen | 188 |
| LRRC15 binding domain 1 | 189 |
| LRRC15 CAR 1 | 190 |
| LRRC15 CAR 2 | 191 |
| LRRC15 binding domain 2 | 192 |
| LRRC15 CAR 3 | 193 |
| LRRC15 CAR 4 | 194 |
| LRRC15 binding domain 3 | 195 |
| LRRC15 CAR 5 | 196 |
| LRRC15 CAR 6 | 197 |
| MSLN binding domain 3 | 198 |
| MSLN CAR 5 | 199 |
| MSLN CAR 6 | 200 |
| MSLN binding domain 4 | 201 |
| MSLN CAR 7 | 202 |
| MSLN CAR 8 | 203 |
| MSLN binding domain 5 | 204 |
| MSLN CAR 9 | 205 |
| MSLN CAR 10 | 206 |
| MSLN binding domain 6 | 207 |
| MSLN CAR 11 | 208 |
| MSLN CAR 12 | 209 |
| MSLN binding domain 7 | 210 |
| MSLN CAR 13 | 211 |
| MSLN CAR 14 | 212 |
| MSLN binding domain 8 | 213 |
| MSLN CAR 15 | 214 |
| MSLN CAR 16 | 215 |
| MSLN binding domain 9 | 216 |
| MSLN CAR 17 | 217 |
| MSLN CAR 18 | 218 |
| MSLN binding domain 10 | 219 |
| MSLN CAR 19 | 220 |
| MSLN CAR 20 | 221 |
| MSLN binding domain11 | 222 |
| MSLN CAR 21 | 223 |
| MSLN CAR 22 | 224 |
| MSLN binding domain 12 | 225 |
| MSLN CAR 23 | 226 |
| MSLN CAR 24 | 227 |
| MSLN binding domain 13 | 228 |
| MSLN CAR 25 | 229 |
| MSLN CAR 26 | 230 |
| MUC16 Binding domain 2 | 231 |
| MUC16 CAR 3 | 232 |
| MUC16 CAR 4 | 233 |
| MUC16 Binding domain 3 | 234 |
| MUC16 CAR 5 | 235 |
| MUC16 CAR 6 | 236 |
| MUC16 Binding domain 4 | 237 |
| MUC16 CAR 7 | 238 |
| MUC16 CAR 8 | 239 |
| MUC16 Binding domain 5 | 240 |
| MUC16 CAR 9 | 241 |
| MUC16 CAR 10 | 242 |
| MUC17 Antigen | 243 |
| MUC17 Binding domain 1 | 244 |
| MUC17 CAR 1 | 245 |
| MUC17 CAR 2 | 246 |
| MUC17 Binding domain 2 | 247 |
| MUC17 CAR 3 | 248 |
| MUC17 CAR 4 | 249 |
| MUC17 Binding domain 3 | 250 |
| MUC17 CAR 5 | 251 |
| MUC17 CAR 6 | 252 |
| MUC17 Binding domain 4 | 253 |
| MUC17 CAR 7 | 254 |
| MUC17 CAR 8 | 255 |
| ROR1 binding domain 2 | 256 |
| ROR1 CAR 3 | 257 |
| ROR1 CAR 4 | 258 |
| ROR1 binding domain3 | 259 |
| ROR1 CAR 5 | 260 |
| ROR1 CAR 6 | 261 |
| ROR1 binding domain 4 | 262 |
| ROR1 CAR 7 | 263 |
| ROR1 CAR 8 | 264 |
| ROR1 binding domain5 | 265 |
| ROR1 CAR9 | 266 |
| ROR1 CAR 10 | 267 |
| ROR1 binding domain6 | 268 |
| ROR1 CAR 11 | 269 |
| ROR1 CAR 12 | 270 |

Table 4 lists various sequence identifiers and their sequences for establishing various anti-antigen CAR T cells.

| | |
|---|---|
| CD70 binding domain 10 | 271 |
| CD70 CAR 19 | 272 |
| CD70 CAR 20 | 273 |
| CD70 binding domain 11 | 274 |
| CD70 CAR 21 | 275 |
| CD70 CAR 22 | 276 |
| CD70 binding domain 12 | 277 |
| CD70 CAR 23 | 278 |
| CD70 CAR 24 | 279 |
| CD70 binding domain 13 | 280 |
| CD70 CAR 25 | 281 |
| CD70 CAR 26 | 282 |
| CD70 binding domain 14 | 283 |
| CD70 CAR 27 | 284 |
| CD70 CAR 28 | 285 |
| CD70 binding domain 15 | 286 |
| CD70 CAR 29 | 287 |
| CD70 CAR 30 | 288 |
| CD70 binding domain 16 | 289 |
| CD70 CAR 31 | 290 |
| CD70 CAR 32 | 291 |
| CD70 binding domain 17 | 292 |
| CD70 CAR 33 | 293 |
| CD70 CAR 34 | 294 |
| CD70 binding domain 18 | 295 |
| CD70 CAR 35 | 296 |
| CD70 CAR 36 | 297 |
| CLDN18.2 binding domain 2 | 298 |
| CLDN18.2 CAR 3 | 299 |
| CLDN18.2 CAR 4 | 300 |
| CLDN18.2 binding domain 3 | 301 |
| CLDN18.2 CAR 5 | 302 |
| CLDN18.2 CAR 6 | 303 |
| CLDN18.2 binding domain 4 | 304 |
| CLDN18.2 CAR 7 | 305 |
| CLDN18.2 CAR 8 | 306 |
| CLDN18.2 binding domain 5 | 307 |
| CLDN18.2 CAR 9 | 308 |
| CLDN18.2 CAR 10 | 309 |
| CLDN18.2 binding domain6 | 310 |
| CLDN18.2 CAR 11 | 311 |
| CLDN18.2 CAR 12 | 312 |
| CLDN18.2 binding domain7 | 313 |
| CLDN18.2 CAR 13 | 314 |
| CLDN18.2 CAR 14 | 315 |
| CLDN18.2 binding domain8 | 316 |
| CLDN18.2 CAR 15 | 317 |
| CLDN18.2 CAR 16 | 318 |
| FAP binding domain 3 | 319 |
| FAP CAR 5 | 320 |
| FAP CAR 6 | 321 |
| FAP binding domain 4 | 322 |
| FAP CAR 5 | 323 |
| FAP CAR 6 | 324 |
| FAP binding domain 5 | 325 |
| FAP CAR 5 | 326 |
| FAP CAR 6 | 327 |
| FAP binding domain 6 | 328 |
| FAP CAR 5 | 329 |
| FAP CAR 6 | 330 |
| FAP binding domain 7 | 331 |
| FAP CAR 5 | 332 |
| FAP CAR 6 | 333 |
| FAP binding domain 8 | 334 |
| FAP CAR 5 | 335 |
| FAP CAR 6 | 336 |
| FCRL1 antigen | 337 |

### Example 2. In Vitro and In Vivo Assay: ALPP CAR T Cells

[0330] Alkaline phosphatase (placental type, ALPP for short) is a single transmembrane glycoprotein with 535 amino acids, which can catalyze the hydrolysis of phosphate monoesters. ALPP is mainly expressed in the placenta. In normal tissues, it is only expressed in the endometrium at a low level. However, ALPP is highly expressed in a variety of cancers including melanoma, seminoma, mesothelioma, gastric cancer, pancreatic cancer, ovarian cancer and endometrial cancer.

[0331] FIGS. 4A-4D, and 5A-5C show ALPP CAR T cells' anti-tumor activities in vitro experiments. Embodiment 102 of FIG. 1 shows a schematic diagram of the vector which includes the ALPP scFv sequence (SEQ ID NO: 42), transmembrane region, co-stimulatory domain, and CD3ζ. FIG. 4 shows cytokine release of ALPP CAR T cells cultured with various substrate cells. Cytometric Bead Array (CBA) was performed to detect IL2, TNF-α, IFN-γ, and Gramzyme B in the supernatant of the media. FIG. 5 shows cell proliferation of ALPP CAR T cells cultured with various substrate cells. Cell tracing assay (CellTracing™) was performed to observe the proliferation of the cells.

[0332] FIGS. 6 and 7 show ALPP CAR T cells have anti-tumor activities in in vivo experiments. Subcutaneous tumor model was constructed by subcutaneously injecting 4.0×10⁶ A375-ALPP cells into mice on day 1. On day 10, the mice inoculated with tumor cells were randomly divided into Mock group infused with no T cells, NT group infused with non-transduced T cells, and CAR T group infused with ALPP CAR T cells (SEQ ID NO: 43). These three groups of mice were given an equal volume of DPBS, 8.0×10⁶ NT cells, and 8.0×10⁶ ALPP CAR T cells through the tail vein, respectively. The body weight of the mice was recorded daily; the size of the tumor was measured; and blood was collected from the marginal venous plexus every week for flow cytometry to detect the proliferation of T cells in the peripheral blood.

[0333] FIG. 6A shows the scheme for in vivo experiments. FIG. 6B shows the use of immunohistochemical staining (Immunohistochemical staining, IHC) to detect the expression of ALPP in mice with subcutaneous tumors. (Antibody: R&D, Inc. Human Alkaline Phosphatase/ALPP Antibody Monoclonal Mouse IgG1 Clone #696128). FIG. 7 shows the changes in tumor volume of mice in each group over time. These results show that ALPP CAR T cells exhibited anti-tumor activities. After cell infusion, blood was taken from the marginal venous plexus of the mice for flow cytometry assay. The flow cytometry assay results showed that ALPP CAR T cells in the peripheral blood of the CAR T group were significantly proliferated. At day 26, continuous growth of subcutaneous tumors in the mock group and NT group was observed, while the growth of subcutaneous tumors in the CAR T group was inhibited. In sum, ALPP CAR T cells expanded in tumor-bearing mice and effectively inhibited the growth of tumors, showing strong anti-tumor activities with little toxicity.

### Example 3. In Vitro and In Vivo Assay: MSLN CAR T Cells

[0334] Mesothelin (MSLN) is a cell surface protein fixed by glycosylphosphatidylinositol and mainly plays a role of adhesion. MSLN is expressed in normal mesothelial cells and a wide range of high expression in solid tumors including mesothelioma, breast cancer, pancreatic cancer, and lung cancer.

[0335] FIGS. 8A-8D, and 9A-9C show MSLN CAR T cells' anti-tumor activities in in vitro experiments. Embodiment 104 of FIG. 1 shows a schematic diagram of the vector which includes the MSLN scFv sequence (SEQ ID NO: 23), transmembrane region, co-stimulatory domain, and CD3. FIGS. 8A-8D show cytokine release of MSLN CAR T cells cultured with various substrate cells. Cytometric Bead Array (CBA) was performed to detect IL2, TNF-α, IFN-γ, and Gramzyme B in the supernatant of the media. FIGS. 9A-9C show cell proliferation of MSLN CAR T cells cultured with various substrate cells. Cell tracing assay (CellTracing™) was performed to observe the proliferation of cells.

[0336] FIGS. 10A-10B, and 11 show MSLN CAR T cells have anti-tumor activities in in vivo experiments. Subcutaneous tumor model was constructed by subcutaneously injecting 4.0×10⁶ ASPC-1 cells into mice on day 1. On day 17, the mice inoculated with tumor cells were randomly divided into Mock group infused with no T cells, NT group infused with non-transduced T cells, and CAR T group infused with MSLN CAR T cells (SEQ ID NO: 24). These three groups of mice were given an equal volume of DPBS, 7.5×10⁶ NT cells, and 7.5×10⁶ MSLN CAR T cells through the tail vein, respectively. The body weight of the mice was recorded daily; the size of the tumor was measured; and blood was collected from the marginal venous plexus every week for flow cytometry to detect the proliferation of T cells in the peripheral blood.

[0337] FIG. 10A shows the scheme for in vivo experiments. FIG. 10B shows the use of immunohistochemical staining (Immunohistochemical staining, IHC) to detect the expression of MSLN in mouse with subcutaneous tumors. (Antibody: Abcam, Inc. Recombinant Anti-Mesothelin Monoclonal Rabbit IgG Clone #EPR19025-42). FIG. 11 shows the changes in tumor volume of mice in each group over time. These results show that MSLN CAR T cells exhibited anti-tumor activities. After cell infusion, blood was taken from the marginal venous plexus of the mice for flow cytometry assay. The flow cytometry assay results showed that MSLN CAR T cells in the peripheral blood of the CAR T group were significantly expanded. On day 30, continuous growth of subcutaneous tumors in the mock group and NT group was observed, while the growth of subcutaneous tumors in the CAR T group was inhibited. In sum, MSLN CAR T cells expanded in tumor-bearing mice and effectively inhibited the growth of tumors, showing strong anti-tumor activities with little toxicity.

### Example 4. In Vitro and In Vivo Assay: CD70 CAR T Cells

[0338] CD70 (Tumor necrosis factor ligand superfamily member 7, TNFSF7), a member of the tumor necrosis factor (TNF) superfamily, is also a ligand for CD27. CD70 is expressed at low levels in some B cells and dendritic cells and is not expressed or expressed at very low levels in some important organs. Because of its high expression in tumors such as kidney cancer, pancreatic cancer, lung cancer and melanoma, it has become a target of tumor immunotherapy.

[0339] FIGS. 12A-12C, and 13A-13E show MSLN CAR T cells' anti-tumor activities in vitro experiments. Embodiment 106 of FIG. 1 shows a schematic diagram of the vector which includes the CD70 scFv sequence (SEQ ID NO: 2), transmembrane region, co-stimulatory domain, and CD3. FIGS. 12A-12C show cytokine release by CD70 CAR T cells cultured with various substrate cells. Cytometric Bead Array (CBA) was performed to detect TNF-α, IFN-γ, and Gramzyme B in the supernatant of the media. FIGS. 13A-13E show cell proliferation of CD70 CAR T cells cultured with various substrate cells. Cell tracing assay (CellTracing™) was performed to observe the proliferation of cells.

[0340] FIGS. 14A-14B, and 15 show CD70 CAR T cells had anti-tumor activities in in vivo experiments. Subcutaneous tumor model was constructed by subcutaneously injecting 4.0×10⁶ A375 cells into mice on day 1. On day 17, the mice inoculated with tumor cells were randomly divided into Mock group infused with no T cells, NT group infused with non-transduced T cells, and CAR T group infused with CD70 CAR T cells (SEQ ID NO: 3). These three groups of mice were given an equal volume of DPBS, 7.5×10⁶ NT cells, and 7.5×10⁶ CD70 CAR T cells through the tail vein, respectively. The body weight of the mice was recorded daily; the size of the tumor was measured; and blood was collected from the marginal venous plexus every week for flow cytometry to detect the proliferation of T cells in the peripheral blood.

[0341] FIG. 14A shows the scheme for in vivo experiments. FIG. 14B shows the use of immunohistochemical staining (Immunohistochemical staining, IHC) to detect the expression of CD70 in mice with subcutaneous tumors. (R&D, Inc. Human CD27 Ligand/TNFSF7 Antibody Monoclonal Mouse IgG2B Clone #301731). FIG. 15 shows the changes in tumor volume of mice in each group over time. These results show that CD70 CAR T cells exhibited anti-tumor activities. After cell infusion, blood was taken from the marginal venous plexus of the mice for flow cytometry assay. The flow cytometry assay results showed that CD70 CAR T cells in the peripheral blood of the CAR T group were significantly expanded. On day 30, continuous growth of subcutaneous tumors in the mock group and NT group was observed, while the growth of subcutaneous tumors in the CAR T group was inhibited. In sum, CD70 CAR T cells expanded in tumor-bearing mice and effectively inhibited the growth of tumors, showing strong anti-tumor activities with little toxicity.

### Example 5. In Vitro and In Vivo Assay: ACPP CAR T Cells

[0342] FIGS. 16 and 17 show ACPP CAR T cells exhibited good anti-tumor activity in vitro. The expression of ACPP on the surface of tumor cells PC3-WT and PC3-ACPP was determined using flow cytometry. (The expression of CD137, T cell activation marker, was detected 24 hours after co-culturing CAR T cells or NT cells with PC3-ACPP using flow cytometry. Determination of IL-2, TNF-α, IFN-γ, and Granzyme B in the supernatant of the cultures 24 hours after co-culturing CAR T cells or NT cells with PC3-wt or PC3-ACPP using Cytometric Bead Array (CBA). Fluorescence imaging results of tumor cells alone or five days after co-culture with CAR T cells or NT cells (100×). The results of the in vitro studies show that ACPP CAR T cells (SEQ ID NOs: 49 and 50) can be effectively activated and can release multiple cytokines after contact with ACPP-positive tumor cells, to specifically kill tumor cells. When ACPP CAR T cells were co-cultured with PC3-ACPP cells, ACPP CAR T cells were specifically activated compared to NT cells, showing increased CD137 expression. High levels of IL-2, TNF-α, IFN-γ and Granzyme B were detected in the supernatant of the cultures by flow cytometry after 24-hour. In addition, PC3-ACPP and PC3-wt were both labeled with green fluorescent protein, and the cytotoxicity effect of CAR T cells on tumor cells was observed under fluorescence microscope. It was found that CAR T cells can effectively and specifically kill PC3-ACPP cells, but had no observable cytotoxic effect on PC3-wt.

[0343] FIGS. 18A-18C and 19 show that ACPP CAR T cells exhibited good anti-tumor effect in mice. Scheme for in vivo experiments: Prostate cancer metastatic model was established by injecting PC3-ACPP tumor cells through the caudal vein of mice on day −9 (D-9), followed by injecting CAR T cells or NT cells 9 days later. Peripheral blood was collected at D7, D14 and D21 for analysis. Changes in body weight of mice in each group at D14 and D21. The level of IFN-γ in the peripheral blood of mice at D7. The absolute number of human T cells and the ratio of human T cells to mouse white blood cells in the peripheral blood at D7, D14 and D21. Tumor metastasis in liver and kidney of each group. *: P<0.05, **: P<0.01, ***: P<0.001. In vivo studies show that ACPP CAR T cells exhibited good anti-tumor effect. Body weight monitoring revealed significant weight loss at D21 in mice in both MOCK and NT groups. Peripheral blood was collected every week after infusion. Significant human T cell proliferation along with IFN-γ release was observed in the peripheral blood of mice in the CAR T group. By D21, the mice in both MOCK and NT group were observed to have dark and rough hair, asthenia, paralysis, hunchback and even death, while the mice in the CAR T group were all in healthy condition. The mice were sacrificed on D21, and their main organs were collected and analyzed for tumor metastasis. It was found that the ACPP CAR T cells significantly inhibited liver and kidney metastasis of PC3-ACPP tumor cells. In conclusion, ACPP CAR T cells can significantly proliferate in vivo, effectively inhibit tumor metastasis, and show strong anti-tumor activity. Additionally, and no significant damage was observed in the major organs of the mice in the CAR T group, indicating a specific cytotoxicity to ACPP tumor cells.

### Example 6. In Vitro and In Vivo Assay: CLDN6 CAR T Cells

[0344] FIGS. 21A-21B show RNA and protein levels of CLDN6 expression in tumor tissues. FIGS. 22A-22B, 23, and 24A-24C show CLDN6 CAR T cells exhibited good anti-tumor activity in vitro. FIG. 22A shows the construct of the vector encoding CLDN6 CAR (scFv of CLDN6 CAR: SEQ ID NO: 12; CLDN6 CAR: SEQ ID NO: 14). FIG. 22B shows the expression of CLDN6 on the surface of HEPG2, and Huh-7, and CLDN6 expression was determined using CLDN6 antibodies. FIG. 23 shows the expression of CD137, T cell activation marker, was detected 24 hours after co-culturing CAR T cells or NT cells with HepG2 or Huh7 using flow cytometry. FIGS. 24A-24C show determination of IL-2, IFN-γ, and Granzyme B in the supernature of the cultures 24 hours after co-culturing CAR T cells or NT cells with PC3-wt or PC3-CLDN6 using Cytometric Bead Array (CBA). The results of the in vitro studies show that CLDN6 CAR T cells can be effectively activated and can release multiple cytokines after contact with CLDN6-positive tumor cells, to specifically kill tumor cells.

[0345] FIGS. 25A-25B show that CLDN6 CAR T cells exhibited good anti-tumor effect in mice. FIG. 25A shows the scheme for in vivo experiments: Liver cancer metastatic model was established by injecting Huh-7 tumor cells through the caudal vein, followed by injecting CAR T cells or NT cells 9 days later. Peripheral blood was collected on D11, D18 and D25 for analysis. FIG. 25B shows changes in tumor volume of mice infused with Mock T cells and mice infused with CLDN6 CAR T cells. The results of the in vivo studies show that CLDN6 CAR T cells exhibited good anti-tumor effect.

### Example 7. In Vitro and In Vivo Assay: GPC-3 CAR T Cells

[0346] FIG. 26A shows GPC-3 expression in tumor tissues. FIG. 26B shows various structures of CAR molecules used for targeting GPC-3. Vectors encoding each of these CARs were transferred into T cells, to obtain various GPC-3 CAR T cells, and anti-tumor activities were observed when the CAR T cells were co-cultured with target cells expressing GPC-3. For example, FIGS. 27A-27C, 28, 29A-29D, and 30A-30C show GPC-3 CAR T cells (CAR Molecule ID 8803, scFv of GPC-3 CAR: SEQ ID NO: 16) exhibited good anti-tumor activity in vitro. FIG. 27A shows that the vector encoding GPC-3 CAR. FIG. 27B shows the expression of GPC-3 on the surface of HEPG2 and Huh-7, and GPC-3 was determined using GPC-3 antibodies. FIG. 27C shows western blot results of GPC-3 expression in various cells. FIG. 28 shows the expression of CD137, a T cell activation marker, was detected 24 hours after co-culturing CAR T cells or NT cells with or without HepG2 or with or without Huh7 using flow cytometry. FIGS. 29A-29D shows determination of IL-2, TNF-α, IFN-γ, and Granzyme B in the supernatant of the cultures 24 hours after co-culturing CAR T cells or NT cells with substrate cells. FIGS. 30A-30C show results of CellTrace™ assay showing proliferation of CAR T cells co-cultured with substrate cells. The results of the in vitro studies show that GPC-3 CAR T cells can be effectively activated and can release multiple cytokines after contact with GPC-3-positive tumor cells to specifically kill tumor cells.

[0347] FIGS. 31A-31B show that GPC-3 CAR T cells (CAR Molecule ID 8803, GPC-3 CAR: SEQ ID NO: 17) exhibited good anti-tumor effect in mice. FIG. 31A shows the scheme for in vivo experiments. Metastatic liver cancer model was established by injecting Huh-7 tumor cells through the caudal vein of mice, followed by injecting CAR T cells or NT cells 9 days later. Peripheral blood was collected at D11, D18 and D25 for analysis. FIG. 31B shows changes in tumor volume of mice infused with Mock T cells and mice infused with GPC-3 CAR T cells. The results of the in vivo studies show that GPC-3 CAR T cells exhibited good anti-tumor effect.

### Example 8. In Vivo and In Vitro Data

[0348] FIGS. 32A-32C. ADAM12 CAR T has good antitumor effect in vitro. (FIG. 32A) The figure shows the structure of the vector, including CD8 signal peptide, ADAM12 scFv sequence, transmembrane region, co-stimulatory domain and CD3ζ; (FIG. 32B) The expression of cell lines A549 and A549-ADAM12 was detected by flow cytometry; (FIG. 32C) The expression of NT and ADAM12-CAR T was detected by flow cytometry. Sequences of ADAM12 CAR and Anti-ADAM12 scFv are SED ID NOs: 56 and 55, respectively.

[0349] After tumor cell lines were co-cultured with CAR T cells for 24 hours, the expression of T cell activation marker CD137 was detected by flow cytometry (FIG. 33A). Cytometric Bear Array (CBA) was used to detect IL2, —TNF-α, IFN-γ, and Granzyme B in the supernatant of the cultures. The value is normalized and presented as pg per 10⁴ CAR T cells (FIG. 33B). After CAR T cells and NT cells were co-cultured with the above positive tumor cells, the proliferation of each group of cells was observed by CellTrace™ Cell Proliferation Kit (FIGS. 34A-34C).

[0350] The results of the in vitro experiments show that CAR T cells targeting ADAM12 can be effectively activated, and when cultured with positive tumor cells, these CAR T cells can release a variety of cytokines to specifically kill tumor cells and proliferate.

[0351] ADAM12 CAR T cells or control cells (non-transduced T cells) or PBS solution (mock) were injected (D0) into NOG mice with established tumors from lung cancer cell line A549-ADAM12 expressing ADAM12. Orbital sinus blood was then collected at D6, D13, and D21 post-injection to quantitate CAR T cells (by flow cytometry). Tumor volume was also measured at D-16, D0, and at 2-4 day intervals over 19 days. ADAM12 CAR T cells expanded in vivo up to 10⁵ cells/mL and with significant tumor elimination. The results show that ADAM12 CAR T cells can efficiently eliminate ADAM12-expressing tumor cells in vivo.

[0352] FIGS. 35A-35C: (FIG. 35A) Schematic illustration of the in vivo studies using ADAM12 CAR T cells. The tumor xenograft model was established by the subcutaneous injection of 5×10⁶ A549-ADAM12 cells into mice at D-16. Sixteen days later (D0), the inoculated mice were randomly divided into the MOCK group, NT group, and ADAM12 CAR T group and infused with 4.0×10⁶ non-transduced T cells or 4.0×10⁶ ADAM12 CAR T cells via their tail vein. The tumor volumes of the mice were measured every few days until Day 19. Peripheral blood was collected on D6, D13, and D21 for the analysis of T cell proliferation. (FIG. 35B) The proliferation of CAR T cells in the peripheral blood of mice in the ADAM12 CAR T group, NT group, and mock groups on D6, D13, and D21 was assessed by flow cytometry. (FIG. 35C) Tumor volumes of the mice over time. P value<0.05=*, <0.01=**, <0.001=***, <0.0001=****; P 0.05=no significance=NS.

[0353] FIGS. 36A-36B shows mixed CAR T cells including ADAM12 CAR and CD19 CAR T (CoupledCAR®) cells exhibited good anti-tumor effect in mice. (FIG. 36A) Scheme for in vivo experiments: A subcutaneous tumor model was established by subcutaneous injection of 5.0×10⁶ A549-ADAM12 tumor cells into mice on D-16. After 16 days (D0), an equal volume of DPBS and 4.0×10⁶ CAR T cells were injected into the tail vein for treatment. Blood was taken from the marginal venous plexus on D6, D13 and D21 for flow cytometry analysis. (FIG. 36B) Changes in tumor volume of mice in each group over time, *P<0.05, **P<0.01, ***P<0.001, ns means no significant difference. FIG. 37 shows the ratio of CD4+ and CD8+ cells in the peripheral blood after blood was taken from the marginal venous plexus on D21.

[0354] Further results of the in vitro experiments show that CAR T cells targeting CD205 (scFv: SEQ ID NO: 8; CAR: SEQ ID NO: 339) can be effectively activated, and when cultured with corresponding tumor cells, these CAR T cells can release a variety of cytokines to specifically kill tumor cells and proliferate. FIGS. 38A-38C shows CD205 CAR T exhibited good antitumor effect in vitro. (FIG. 38A) The figure shows the vector which includes CD205 scFv sequence, CD8 signal peptide, transmembrane region, co-stimulatory domain, and CD3ζ. (FIG. 38B) The expression of cell lines 293T and HT29 was detected by flow cytometry. (FIG. 38C) The expression of NT and CD205 CAR T was detected by flow cytometry.

[0355] FIGS. 39A-39B show CD205 CAR T exhibited good antitumor effect in vitro. (FIG. 39A) After a variety of tumor cell lines were co-cultured with CAR T cells for 24 hours, the expression of T cell activation marker CD137 was detected by flow cytometry. (FIG. 39B) Cytometric Bear Array (CBA) was used to detect IL2, —TNF-α, IFN-γ, and Gramzyme B content in the supernatant of the cultures. The value is normalized and presented as pg per 10⁴ CAR T cells. FIGS. 40A-40C show the proliferation of each group of cells using CellTrace™ Cell Proliferation Kit, after CAR T cells and NT cells were co-cultured with the above positive tumor cells.

[0356] CD205 CAR T cells or control cells (non-transduced T cells) or PBS solution (Mock) were injected on D0 into NOG mice with established tumors from colon cancer cell line HT29-CD205 expressing CD205. Orbital sinus blood was then collected on D7, D14, and D21 post-injection to quantitate CAR T cells (by flow cytometry). Tumor volume was also measured on DO and at 2-4 day intervals for over 29 days. CD205 CAR T cells expanded in vivo up to 10⁶ cells/mL and were associated with limited tumor growth compared to controls. The results shows that CD205 CAR T cells can inhibit CD205-expressing HT29-CD205 tumor growth in vivo.

[0357] FIGS. 41A-41C: (FIG. 41A) Schematic illustration of the in vivo studies. The tumor xenograft model was established by the subcutaneous injection of 5.0×10⁶ HT29-CD205 cells (D-7). Seven days later (D0), the inoculated mice were randomly divided into the MOCK group and non-transduced T cells group and CAR T cell group, 1.0×10⁶ NT cells and 1.0×10⁶ CD205 CAR T cells via their tail vein. The tumor volumes of the mice were measured every several days until Day 29. Peripheral blood was collected on days 7, 14 and 21 for the analysis of T cell proliferation. (FIG. 41B) The proliferation of CAR T cells in the peripheral blood of mice in all of the CD205 CAR T, NT and MOCK groups on days 7, 14 and 21 was assessed by flow cytometry. (FIG. 41C) Tumor volumes change in the mice over time. P value<0.05=*, <0.01=**, <0.001=***, <0.0001=****; P 0.05=no significance=NS.

[0358] FIGS. 42A-42B show CD205 CAR T exhibited good anti-tumor effect in mice. (Blood was taken from the marginal venous plexus on D7, D14, and D20 days for flow cytometry analysis. Immunohistochemical staining (IHC) was used to detect the expression of CD205 in mouse subcutaneous tumors. On D20, blood from the marginal venous plexus was collected to detect the ratio of CD4+ and CD8+ cells in the peripheral blood. (FIG. 42B) Changes in tumor volume of mice in each group over time, *P<0.05, **P<0.01, ***P<0.001, ns means no significant difference. FIGS. 43A-43B show comparisons of anti-tumor activity of different infused cells. The experimental procedure was the same of that of FIGS. 42A-42B. As shown in FIGS. 43A-43B, CoupledCAR® T cells showed greater anti-tumor activity than single CAR T cells.

[0359] FIG. 44 shows CAR T cells targeting CLDN18.2 showed significant anti-tumor ability in mouse CLDN18.2 positive tumor model. The experiment procedure was similar to that described above and shown in FIG. 41. FIG. 44 shows that CAR T cells targeting CLDN18.2 (scFv: SEQ ID NO: 46; CAR: SEQ ID NO: 47) can significantly expand in tumor-bearing mice, and effectively kill tumors, which indicates strong anti-tumor activity. No obvious toxicity to the mice was observed.

[0360] FIGS. 45A-45B show in vitro proliferation of ROR1 CAR T cells. Sequences and identifiers are provided in the table below. FIGS. 45A-45B show obvious advantages in culture proliferation in terms of the number of CAR T and the number of total T cells.

TABLE 5

| Cell Identifiers | Binding domain sequences | CAR Sequences |
|---|---|---|
| 447 | SEQ ID No: 34 | SEQ ID No: 35 |
| 449 | SEQ ID No: 256 | SEQ ID No: 257 |
| 451 | SEQ ID No: 259 | SEQ ID No: 260 |

### Example 9. Human In Vivo and In Vitro Data

[0361] Clinical studies were designed to assess the safety and efficacy of infusing autologous T cells modified to express several solid tumor markers specific for CAR/4-1BB/CD3-ζ into patients. Patients received CAR T cells directed to CD19 and a solid tumor antigen (MSLN or GPC3). T cells of the patients were obtained, modified, and infused into the patients. T cell responses of patients from the first and second arms were measured and compared using the following protocols, which were approved by the hospitals where the trials were conducted. All patients were provided with written informed consent. Information regarding these patients are provide below in Table 6 (SD: stable disease; PD: progressive disease; PR: partial remission; CR: complete remission; NR: no response).

[0362] PBMCs were obtained from patients. Various lentiviral vectors encoding CAR molecules and/or cytokines were generated, transfected into the T cells, and further cultured for several days before performing the co-cultivation assay. More information can be found in Table 6 below. Techniques related to cell cultures, construction of cytotoxic T-lymphocyte assay can be found in “Control of large, established tumor xenografts with genetically retargeted human T cells containing CD28 and CD137 domains,” PNAS, Mar. 3, 2009, vol. 106 no. 9, 3360-3365, which is incorporated herein by reference in its entirety. T cells were mixed with vectors including a vector encoding CD19 CAR and IL-6, a vector encoding CD19 CAR and IL12, a vector encoding CD19 CAR and IFNγ, and a vector encoding a solid tumor CAR (MSLN or GPC3). Detailed methods can be found at PCT Publication No: WO2020146743, which is incorporated by its entirety. Patients' response to the infused cells are provided in FIGS. 46A-46D, 47A-47C, 48A-48B, 49, 50A-50C, 51A-51C, 52A-52B, and 53A-53D and Table 6 below. FIGS. 46A-46D show the proliferation of T cells and the reduction of tumor markers in Patient 001 after CAR T cell infusion. FIGS. 47A-47C show the proliferation of T cells and CT scanning results for Patient 002 after CAR T cell infusion. FIGS. 48A-48B show the proliferation of T cells in Patient 003 after CAR T cell infusion. FIG. 49 shows CT scanning results in Patient 003 after CAR T cell infusion. FIGS. 50A-50C show the proliferation of T cells and the reduction of a tumor marker in Patient 004 after CAR T cells infusion. FIGS. 51A-51C show the proliferation of T cells and the reduction of a tumor marker in Patient 005 after CAR T cell infusion. FIGS. 52A-52B show CT scanning results of Patient 005 after CAR T cells infusion. FIGS. 53A-53D show the proliferation of T cells, the reduction of a solid tumor marker, and CT scanning results of Patient 006 after CAR T cells infusion.

TABLE 6

| | | | | Binding | | |
|---|---|---|---|---|---|---|
| | | | Dose | Domain scFv | CAR | |
| Patient | Cancer | Target | (CART/KG) | sequences | sequences | Response |
| 001 | Bile Duct | MSLN | 1.09 × 10⁶ | SEQ ID NO: | SEQ ID NO: | M1: Tumor |
| | Cancer | | | 26 | 27 | markers |
| | | | | | | such as |
| | | | | | | CA125 and |
| | | | | | | CEA |
| | | | | | | decreased |
| | | | | | | at one |
| | | | | | | month post |
| | | | | | | infusion |
| 002 | Bile Duct | MSLN | 2.84 × 10⁵ | SEQ ID NO: | SEQ ID NO: | M1: PD |
| | Cancer | | | 26 | 27 | |
| 003 | Pancreatic | MSLN | 1.17 × 10⁵ | SEQ ID NO: | SEQ ID NO: | M1: Target |
| | Cancer | | | 26 | 27 | lesion |
| | | | | | | Shrinkage: −22% |
| 004 | Liver | GPC3 | 2.83 × 10⁵ | SEQ ID NO: | SEQ ID NO: | M1: Tumor |
| | Cancer | | | 16 | 17 | markers |
| | | | | | | such as |
| | | | | | | AFP |
| | | | | | | decreased |
| | | | | | | at one |
| | | | | | | month post |
| | | | | | | infusion |
| 005 | Liver | GPC3 | 3.27 × 10⁵ | SEQ ID NO: | SEQ ID NO: | M1: Partial |
| | Cancer | | | 16 | 17 | Metabolic |
| | | | | | | Response |
| | | | | | | (Percist1.0) |
| | | | | | | Target |
| | | | | | | lesion |
| | | | | | | Shrinkage: −32% |
| 006 | Liver | GPC3 | 1.14 × 10⁶ | SEQ ID NO: | SEQ ID NO: | M1: SD |
| | Cancer | | | 16 | 16 | |

TABLE 7

| | SEQ | | SEQ | | SEQ | | SEQ |
|---|---|---|---|---|---|---|---|
| ID | ID | ID | ID | ID | ID | ID | NO |
| CD70 antigen | 1 | CD70 binding | 85 | GPC3 | 169 | MUC17 Binding | 253 |
| | | domain 2 | | binding | | domain 4 | |
| | | | | domain 9 | | | |
| CD70 binding | 2 | CD70 CAR 3 | 86 | GPC3 CAR | 170 | MUC17 CAR 7 | 254 |
| domain | | | | 17 | | | |
| CD70 CAR | 3 | CD70 CAR 4 | 87 | GPC3 CAR | 171 | MUC17 CAR 8 | 255 |
| | | | | 18 | | | |
| CD205 | 4 | CD70 binding | 88 | GPC3 | 172 | ROR1 binding | 256 |
| antigen | | domain 3 | | binding | | domain 2 | |
| | | | | domain 10 | | | |
| CD205 | 5 | CD70 CAR 5 | 89 | GPC3 CAR | 173 | ROR1 CAR 3 | 257 |
| binding | | | | 19 | | | |
| domain 1 | | | | | | | |
| CD205 CAR | 6 | CD70 CAR 6 | 90 | GPC3 CAR | 174 | ROR1 CAR 4 | 258 |
| 1 | | | | 20 | | | |
| CD205 CAR | 7 | CD70 binding | 91 | GPC3 | 175 | ROR1 binding | 259 |
| 2 | | domain 4 | | binding | | domain3 | |
| | | | | domain 11 | | | |
| CD205 | 8 | CD70 CAR 7 | 92 | GPC3 CAR | 176 | ROR1 CAR 5 | 260 |
| binding | | | | 21 | | | |
| domain 2 | | | | | | | |
| CD205 CAR | 9 | CD70 CAR 8 | 93 | GPC3 CAR | 177 | ROR1 CAR 6 | 261 |
| 3 | | | | 22 | | | |
| CD205 CAR | 10 | CD70 binding | 94 | HAVCR1 | 178 | ROR1 binding | 262 |
| 4 | | domain 5 | | antigen | | domain 4 | |
| CLDN6 | 11 | CD70 CAR 9 | 95 | HAVCR1 | 179 | ROR1 CAR 7 | 263 |
| antigen | | | | binding | | | |
| | | | | domain | | | |
| CLDN6 | 12 | CD70 CAR 10 | 96 | HAVCR1 | 180 | ROR1 CAR 8 | 264 |
| binding | | | | CAR 1 | | | |
| domain | | | | | | | |
| CLDN6 | 13 | CD70 binding | 97 | HAVCR1 | 181 | ROR1 binding | 265 |
| binding | | domain 6 | | CAR 2 | | domain5 | |
| domain 2 | | | | | | | |
| CLDN6 CAR | 14 | CD70 CAR 11 | 98 | HAVCR1 | 182 | ROR1 CAR9 | 266 |
| 1 | | | | binding | | | |
| | | | | domain 2 | | | |
| GPC3 | 15 | CD70 CAR 12 | 99 | HAVCR1 | 183 | ROR1 CAR 10 | 267 |
| antigen | | | | CAR 3 | | | |
| GPC3 | 16 | CD70 binding | 100 | HAVCR1 | 184 | ROR1 binding | 268 |
| binding | | domain 7 | | CAR 4 | | domain6 | |
| domain 1 | | | | | | | |
| GPC3 CAR 1 | 17 | CD70 CAR 13 | 101 | HAVCR1 | 185 | ROR1 CAR 11 | 269 |
| | | | | binding | | | |
| | | | | domain 3 | | | |
| GPC3 CAR 2 | 18 | CD70 CAR 14 | 102 | HAVCR1 | 186 | ROR1 CAR 12 | 270 |
| | | | | CAR 5 | | | |
| GPC3 | 19 | CD70 binding | 103 | HAVCR1 | 187 | CD70 binding | 271 |
| binding | | domain 8 | | CAR 6 | | domain 10 | |
| domain 2 | | | | | | | |
| GPC3 CAR 3 | 20 | CD70 CAR 15 | 104 | LRRC15 | 188 | CD70 CAR 19 | 272 |
| | | | | antigen | | | |
| GPC3 CAR 4 | 21 | CD70 CAR 16 | 105 | LRRC15 | 189 | CD70 CAR 20 | 273 |
| | | | | binding | | | |
| | | | | domain 1 | | | |
| MSLN | 22 | CD70 binding | 106 | LRRC15 | 190 | CD70 binding | 274 |
| antigen | | domain 9 | | CAR 1 | | domain 11 | |
| MSLN | 23 | CD70 CAR 17 | 107 | LRRC15 | 191 | CD70 CAR 21 | 275 |
| binding | | | | CAR 2 | | | |
| domain 1 | | | | | | | |
| MSLN CAR 1 | 24 | CD70 CAR 18 | 108 | LRRC15 | 192 | CD70 CAR 22 | 276 |
| | | | | binding | | | |
| | | | | domain 2 | | | |
| MSLN CAR 2 | 25 | CD205 | 109 | LRRC15 | 193 | CD70 binding | 277 |
| | | antigen 3 | | CAR 3 | | domain 12 | |
| MSLN | 26 | CD205 CAR 5 | 110 | LRRC15 | 194 | CD70 CAR 23 | 278 |
| binding | | | | CAR 4 | | | |
| domain 2 | | | | | | | |
| MSLN CAR 3 | 27 | CD205 CAR 6 | 111 | LRRC15 | 195 | CD70 CAR 24 | 279 |
| | | | | binding | | | |
| | | | | domain 3 | | | |
| MSLN CAR 4 | 28 | CD205 | 112 | LRRC15 | 196 | CD70 binding | 280 |
| | | antigen 3 | | CAR 5 | | domain 13 | |
| MUC16 | 29 | CD205 CAR 5 | 113 | LRRC15 | 197 | CD70 CAR 25 | 281 |
| antigen | | | | CAR 6 | | | |
| MUC16 | 30 | CD205 CAR 6 | 114 | MSLN | 198 | CD70 CAR 26 | 282 |
| binding | | | | binding | | | |
| domain | | | | domain 3 | | | |
| MUC16 CAR | 31 | CLDN6 CAR 2 | 115 | MSLN CAR | 199 | CD70 binding | 283 |
| 1 | | | | 5 | | domain 14 | |
| MUC16 CAR | 32 | CLDN6 CAR 3 | 116 | MSLN CAR | 200 | CD70 CAR 27 | 284 |
| 2 | | | | 6 | | | |
| ROR1 | 33 | CLDN6 CAR 4 | 117 | MSLN | 201 | CD70 CAR 28 | 285 |
| antigen | | | | binding | | | |
| | | | | domain 4 | | | |
| ROR1 | 34 | DLL3 antigen | 118 | MSLN CAR | 202 | CD70 binding | 286 |
| binding | | | | 7 | | domain 15 | |
| domain | | | | | | | |
| ROR1 CAR 1 | 35 | DLL3 binding | 119 | MSLN CAR | 203 | CD70 CAR 29 | 287 |
| | | domain | | 8 | | | |
| ROR1 CAR 2 | 36 | DLL3 CAR 1 | 120 | MSLN | 204 | CD70 CAR 30 | 288 |
| | | | | binding | | | |
| | | | | domain 5 | | | |
| ADAM12 | 37 | DLL3 CAR 2 | 121 | MSLN CAR | 205 | CD70 binding | 289 |
| antigen | | | | 9 | | domain 16 | |
| ADAM12 | 38 | DLL3 binding | 122 | MSLN CAR | 206 | CD70 CAR 31 | 290 |
| binding | | domain 2 | | 10 | | | |
| domain | | | | | | | |
| ADAM12 | 39 | DLL3 CAR 3 | 123 | MSLN | 207 | CD70 CAR 32 | 291 |
| CAR 1 | | | | binding | | | |
| | | | | domain 6 | | | |
| ADAM12 | 40 | DLL3 CAR 4 | 124 | MSLN CAR | 208 | CD70 binding | 292 |
| CAR 2 | | | | 11 | | domain 17 | |
| ALPP antigen | 41 | DLL3 binding | 125 | MSLN CAR | 209 | CD70 CAR 33 | 293 |
| | | domain 3 | | 12 | | | |
| ALPP binding | 42 | DLL3 CAR 5 | 126 | MSLN | 210 | CD70 CAR 34 | 294 |
| domain | | | | binding | | | |
| | | | | domain 7 | | | |
| ALPP CAR 1 | 43 | DLL3 CAR 6 | 127 | MSLN CAR | 211 | CD70 binding | 295 |
| | | | | 13 | | domain 18 | |
| ALPP CAR 1 | 44 | DLL3 binding | 128 | MSLN CAR | 212 | CD70 CAR 35 | 296 |
| | | domain 4 | | 14 | | | |
| CLDN18.2 | 45 | DLL3 CAR 7 | 129 | MSLN | 213 | CD70 CAR 36 | 297 |
| antigen | | | | binding | | | |
| | | | | domain 8 | | | |
| CLDN18.2 | 46 | DLL3 CAR 8 | 130 | MSLN CAR | 214 | CLDN18.2 | 298 |
| binding | | | | 15 | | binding domain | |
| domain | | | | | | 2 | |
| CLDN18.2 | 47 | DLL3 binding | 131 | MSLN CAR | 215 | CLDN18.2 CAR | 299 |
| CAR 1 | | domain 5 | | 16 | | 3 | |
| CLDN18.2 | 48 | DLL3 CAR 9 | 132 | MSLN | 216 | CLDN18.2 CAR | 300 |
| CAR 2 | | | | binding | | 4 | |
| | | | | domain 9 | | | |
| ACPP | 49 | DLL3 CAR 10 | 133 | MSLN CAR | 217 | CLDN18.2 | 301 |
| binding | | | | 17 | | binding domain | |
| domain | | | | | | 3 | |
| ACPP CAR 1 | 50 | DLL3 binding | 134 | MSLN CAR | 218 | CLDN18.2 CAR | 302 |
| | | domain 6 | | 18 | | 5 | |
| ACPP CAR 2 | 51 | DLL3 CAR 11 | 135 | MSLN | 219 | CLDN18.2 CAR | 303 |
| | | | | binding | | 6 | |
| | | | | domain 10 | | | |
| ADAM12 | 52 | DLL3 CAR 12 | 136 | MSLN CAR | 220 | CLDN18.2 | 304 |
| binding | | | | 19 | | binding domain | |
| domain 2 | | | | | | 4 | |
| ADAM12 | 53 | FAP Antigen | 137 | MSLN CAR | 221 | CLDN18.2 CAR | 305 |
| CAR 3 | | | | 20 | | 7 | |
| ADAM12 | 54 | FAP binding | 138 | MSLN | 222 | CLDN18.2 CAR | 306 |
| CAR 4 | | domain 1 | | binding | | 8 | |
| | | | | domain11 | | | |
| ADAM12 | 55 | FAP CAR 1 | 139 | MSLN CAR | 223 | CLDN18.2 | 307 |
| binding | | | | 21 | | binding domain | |
| domain 3 | | | | | | 5 | |
| ADAM12 | 56 | FAP CAR 2 | 140 | MSLN CAR | 224 | CLDN18.2 CAR | 308 |
| CAR 5 | | | | 22 | | 9 | |
| ADAM12 | 57 | FAP binding | 141 | MSLN | 225 | CLDN18.2 CAR | 309 |
| CAR 6 | | domain 2 | | binding | | 10 | |
| | | | | domain 12 | | | |
| AFP antigen | 58 | FAP CAR 3 | 142 | MSLN CAR | 226 | CLDN18.2 | 310 |
| | | | | 23 | | binding domain6 | |
| AFP binding | 59 | FAP CAR 4 | 143 | MSLN CAR | 227 | CLDN18.2 CAR | 311 |
| domain | | | | 24 | | 11 | |
| AFP CAR 1 | 60 | GPC2 antigen | 144 | MSLN | 228 | CLDN18.2 CAR | 312 |
| | | | | binding | | 12 | |
| | | | | domain 13 | | | |
| AFP CAR 2 | 61 | GPC2 binding | 145 | MSLN CAR | 229 | CLDN18.2 | 313 |
| | | domain | | 25 | | binding domain7 | |
| AFP binding | 62 | GPC2 CAR 1 | 146 | MSLN CAR | 230 | CLDN18.2 CAR | 314 |
| domain 2 | | | | 26 | | 13 | |
| AFP CAR 3 | 63 | GPC2 CAR 2 | 147 | MUC16 | 231 | CLDN18.2 CAR | 315 |
| | | | | Binding | | 14 | |
| | | | | domain 2 | | | |
| AFP CAR 4 | 64 | GPC3 binding | 148 | MUC16 | 232 | CLDN18.2 | 316 |
| | | domain 2 | | CAR 3 | | binding domain8 | |
| AFP binding | 65 | GPC3 CAR 3 | 149 | MUC16 | 233 | CLDN18.2 CAR | 317 |
| domain 3 | | | | CAR 4 | | 15 | |
| AFP CAR 5 | 66 | GPC3 CAR 4 | 150 | MUC16 | 234 | CLDN18.2 CAR | 318 |
| | | | | Binding | | 16 | |
| | | | | domain 3 | | | |
| AFP CAR 6 | 67 | GPC3 binding | 151 | MUC16 | 235 | FAP binding | 319 |
| | | domain 3 | | CAR 5 | | domain 3 | |
| ALPP binding | 68 | GPC3 CAR 5 | 152 | MUC16 | 236 | FAP CAR 5 | 320 |
| domain 2 | | | | CAR 6 | | | |
| ALPP CAR 3 | 69 | GPC3 CAR 6 | 153 | MUC16 | 237 | FAP CAR 6 | 321 |
| | | | | Binding | | | |
| | | | | domain 4 | | | |
| ALPP CAR 4 | 70 | GPC3 binding | 154 | MUC16 | 238 | FAP binding | 322 |
| | | domain 4 | | CAR 7 | | domain 4 | |
| ALPP binding | 71 | GPC3 CAR 7 | 155 | MUC16 | 239 | FAP CAR 5 | 323 |
| domain 3 | | | | CAR 8 | | | |
| ALPP CAR 5 | 72 | GPC3 CAR 8 | 156 | MUC16 | 240 | FAP CAR 6 | 324 |
| | | | | Binding | | | |
| | | | | domain 5 | | | |
| ALPP CAR 6 | 73 | GPC3 binding | 157 | MUC16 | 241 | FAP binding | 325 |
| | | domain 5 | | CAR 9 | | domain 5 | |
| ALPP binding | 74 | GPC3 CAR 9 | 158 | MUC16 | 242 | FAP CAR 5 | 326 |
| domain 4 | | | | CAR 10 | | | |
| ALPP CAR 7 | 75 | GPC3 CAR 10 | 159 | MUC17 | 243 | FAP CAR 6 | 327 |
| | | | | Antigen | | | |
| ALPP CAR 8 | 76 | GPC3 binding | 160 | MUC17 | 244 | FAP binding | 328 |
| | | domain 6 | | Binding | | domain 6 | |
| | | | | domain 1 | | | |
| ALPP binding | 77 | GPC3 CAR 11 | 161 | MUC17 | 245 | FAP CAR 5 | 329 |
| domain 5 | | | | CAR 1 | | | |
| ALPP CAR 9 | 78 | GPC3 CAR 12 | 162 | MUC17 | 246 | FAP CAR 6 | 330 |
| | | | | CAR 2 | | | |
| ALPP CAR | 79 | GPC3 binding | 163 | MUC17 | 247 | FAP binding | 331 |
| 10 | | domain 7 | | Binding | | domain 7 | |
| | | | | domain 2 | | | |
| ALPP binding | 80 | GPC3 CAR 13 | 164 | MUC17 | 248 | FAP CAR 5 | 332 |
| domain 6 | | | | CAR 3 | | | |
| ALPP CAR | 81 | GPC3 CAR 14 | 165 | MUC17 | 249 | FAP CAR 6 | 333 |
| 11 | | | | CAR 4 | | | |
| ALPP CAR | 82 | GPC3 binding | 166 | MUC17 | 250 | FAP binding | 334 |
| 12 | | domain 8 | | Binding | | domain 8 | |
| | | | | domain 3 | | | |
| ALPP CAR | 83 | GPC3 CAR 15 | 167 | MUC17 | 251 | FAP CAR 5 | 335 |
| 13 | | | | CAR 5 | | | |
| ALPP CAR | 84 | GPC3 CAR 16 | 168 | MUC17 | 252 | FAP CAR 6 | 336 |
| 14 | | | | CAR 6 | | | |
| | | | | | | FCRL1 antigen | 337 |
| | | | | | | CD205 CAR 9 | 339 |

[0363] Related sequences are provided in this Application and Innovative Cellular Therapeutics' PCT Patent Applications Nos: PCT/CN2016/075061, PCT/CN2018/08891, and PCT/US19/13068, which are incorporated by reference in their entirety.

[0364] All publications, patents and patent applications cited in this specification are incorporated herein by reference in their entireties as if each individual publication, patent or patent application were specifically and individually indicated to be incorporated by reference. While the foregoing has been described in terms of various embodiments, the skilled artisan will appreciate that various modifications, substitutions, omissions, and changes may be made without departing from the spirit thereof.

The application's sequence listing, which the Patent Office published only in electronic form, follows.

SEQUENCE LISTING (339 sequences)

SEQ ID NO: 1 - protein, 193 aa, Homo sapiens
MPEEGSGCSVRRRPYGCVLRAALVPLVAGLVICLVVCIQRFAQAQQQLPLESLGWDVAELQLNHTGPQQDPRLYWQGGPALGRSFLHGPELDKGQLRIHRDGIYMVHIQVTLAICSSTTASRHHPTTLAVGICSPASRSISLLRLSFHQGCTIASQRLTPLARGDTLCTNLTGTLLPSRNTDETFFGVQWVRP

SEQ ID NO: 2 - protein, 260 aa, Artificial Sequence
  Synthetic construct
MARPHPWWLCVLGTLVGLSATPAPKSCPERHYWAQGKLCCQMCEPGTFLVKDCDQHRKAAQCDPCIPGVSFSPDHHTRPHCESCRHCNSGLLVRNCTITANAECACRNGWQCRDKECTECDPLPNPSLTARSSQALSPHPQPTHLPYVSEMLEARTAGHMQTLADFRQLPARTLSTHWPPQRSLCSSDFIRILVIFSGMFLVFTLAGALFLHQRRKYRSNKGESPVEPAEPCHYSCPREEEGSTIPIQEDYRKPEPACSP

SEQ ID NO: 3 - protein, 372 aa, Artificial Sequence
  Synthetic construct
MARPHPWWLCVLGTLVGLSATPAPKSCPERHYWAQGKLCCQMCEPGTFLVKDCDQHRKAAQCDPCIPGVSFSPDHHTRPHCESCRHCNSGLLVRNCTITANAECACRNGWQCRDKECTECDPLPNPSLTARSSQALSPHPQPTHLPYVSEMLEARTAGHMQTLADFRQLPARTLSTHWPPQRSLCSSDFIRILVIFSGMFLVFTLAGALFLHQRRKYRSNKGESPVEPAEPCHYSCPREEEGSTIPIQEDYRKPEPACSPRVKFSRSADAPAYQQGQNQLYNELNLGRREEYDVLDKRRGRDPEMGGKPRRKNPQEGLYNELQKDKMAEAYSEIGMKGERRRGKGHDGLYQGLSTATKDTYDALHMQALPPR

SEQ ID NO: 4 - protein, 1722 aa, Homo sapiens
MRTGWATPRRPAGLLMLLFWFFDLAEPSGRAANDPFTIVHGNTGKCIKPVYGWIVADDCDETEDKLWKWVSQHRLFHLHSQKCLGLDITKSVNELRMFSCDSSAMLWWKCEHHSLYGAARYRLALKDGHGTAISNASDVWKKGGSEESLCDQPYHEIYTRDGNSYGRPCEFPFLIDGTWHHDCILDEDHSGPWCATTLNYEYDRKWGICLKPENGCEDNWEKNEQFGSCYQFNTQTALSWKEAYVSCQNQGADLLSINSAAELTYLKEKEGIAKIFWIGLNQLYSARGWEWSDHKPLNFLNWDPDRPSAPTIGGSSCARMDAESGLWQSFSCEAQLPYVCRKPLNNTVELTDVWTYSDTRCDAGWLPNNGFCYLLVNESNSWDKAHAKCKAFSSDLISIHSLADVEVVVTKLHNEDIKEEVWIGLKNINIPTLFQWSDGTEVTLTYWDENEPNVPYNKTPNCVSYLGELGQWKVQSCEEKLKYVCKRKGEKLNDASSDKMCPPDEGWKRHGETCYKIYEDEVPFGTNCNLTITSRFEQEYLNDLMKKYDKSLRKYFWTGLRDVDSCGEYNWATVGGRRRAVTFSNWNFLEPASPGGCVAMSTGKSVGKWEVKDCRSFKALSICKKMSGPLGPEEASPKPDDPCPEGWQSFPASLSCYKVFHAERIVRKRNWEEAERFCQALGAHLSSFSHVDEIKEFLHFLTDQFSGQHWLWIGLNKRSPDLQGSWQWSDRTPVSTIIMPNEFQQDYDIRDCAAVKVFHRPWRRGWHFYDDREFIYLRPFACDTKLEWVCQIPKGRTPKTPDWYNPDRAGIHGPPLIIEGSEYWFVADLHLNYEEAVLYCASNHSFLATITSFVGLKAIKNKIANISGDGQKWWIRISEWPIDDHFTYSRYPWHRFPVTFGEECLYMSAKTWLIDLGKPTDCSTKLPFICEKYNVSSLEKYSPDSAAKVQCSEQWIPFQNKCFLKIKPVSLTFSQASDTCHSYGGTLPSVLSQIEQDFITSLLPDMEATLWIGLRWTAYEKINKWTDNRELTYSNFHPLLVSGRLRIPENFFEEESRYHCALILNLQKSPFTGTWNFTSCSERHFVSLCQKYSEVKSRQTLQNASETVKYLNNLYKIIPKTLTWHSAKRECLKSNMQLVSITDPYQQAFLSVQALLHNSSLWIGLFSQDDELNFGWSDGKRLHFSRWAETNGQLEDCVVLDTDGFWKTVDCNDNQPGAICYYSGNETEKEVKPVDSVKCPSPVLNTPWIPFQNCCYNFIITKNRHMATTQDEVHTKCQKLNPKSHILSIRDEKENNFVLEQLLYFNYMASWVMLGITYRNKSLMWFDKTPLSYTHWRAGRPTIKNEKFLAGLSTDGFWDIQTFKVIEEAVYFHQHSILACKIEMVDYKEEYNTTLPQFMPYEDGIYSVIQKKVTWYEALNMCSQSGGHLASVHNQNGQLFLEDIVKRDGFPLWVGLSSHDGSESSFEWSDGSTFDYIPWKGQTSPGNCVLLDPKGTWKHEKCNSVKDGAICYKPTKSKKLSRLTYSSRCPAAKENGSRWIQYKGHCYKSDQALHSFSEAKKLCSKHDHSATIVSIKDEDENKFVSRLMRENNNITMRVWLGLSQHSVDQSWSWLDGSEVTFVKWENKSKSGVGRCSMLIASNETWKKVECEHGFGRVVCKVPLGPDYTAIAIIVATLSILVLMGGLIWFLFQRHRLHLAGFSSVRYAQGVNEDEIMLPSFHD

SEQ ID NO: 5 - protein, 240 aa, Artificial Sequence
  Synthetic construct
EIVLTQSPGTLSLSPGERATLSCRASQSVSSSYLAWYQQKPGQAPRLLIYGASSRATGIPDRFSGSGSGTDFTLTISRLEPEDFAVYYCQQYGSSPYTFGQGTKLEIKGGGGSGGGGSGGGGSEVQLLESGGGLVQPGGSLRLSCAASGFTFRNYDMSWVRQAPGKGLEWVSSISYSGGSTYYADSVKGRFTISRDNSKNTLSLQMNSLRAEDTAVYYCAKRGATPFDYWGQGSLVTVSS

SEQ ID NO: 6 - protein, 463 aa, Artificial Sequence
  Synthetic construct
EIVLTQSPGTLSLSPGERATLSCRASQSVSSSYLAWYQQKPGQAPRLLIYGASSRATGIPDRFSGSGSGTDFTLTISRLEPEDFAVYYCQQYGSSPYTFGQGTKLEIKGGGGSGGGGSGGGGSEVQLLESGGGLVQPGGSLRLSCAASGFTFRNYDMSWVRQAPGKGLEWVSSISYSGGSTYYADSVKGRFTISRDNSKNTLSLQMNSLRAEDTAVYYCAKRGATPFDYWGQGSLVTVSSTTTPAPRPPTPAPTIASQPLSLRPEACRPAAGGAVHTRGLDFACDIYIWAPLAGTCGVLLLSLVITLYCKRGRKKLLYIFKQPFMRPVQTTQEEDGCSCRFPEEEEGGCELRVKFSRSADAPAYQQGQNQLYNELNLGRREEYDVLDKRRGRDPEMGGKPRRKNPQEGLYNELQKDKMAEAYSEIGMKGERRRGKGHDGLYQGLSTATKDTYDALHMQALPPR

SEQ ID NO: 7 - protein, 462 aa, Artificial Sequence
  Synthetic construct
EIVLTQSPGTLSLSPGERATLSCRASQSVSSSYLAWYQQKPGQAPRLLIYGASSRATGIPDRFSGSGSGTDFTLTISRLEPEDFAVYYCQQYGSSPYTFGQGTKLEIKGGGGSGGGGSGGGGSEVQLLESGGGLVQPGGSLRLSCAASGFTFRNYDMSWVRQAPGKGLEWVSSISYSGGSTYYADSVKGRFTISRDNSKNTLSLQMNSLRAEDTAVYYCAKRGATPFDYWGQGSLVTVSSAAAIEVMYPPPYLDNEKSNGTIIHVKGKHLCPSPLFPGPSKPFWVLVVVGGVLACYSLLVTVAFIIFWVRSKRSRLLHSDYMNMTPRRPGPTRKHYQPYAPPRDFAAYRSRVKFSRSADAPAYQQGQNQLYNELNLGRREEYDVLDKRRGRDPEMGGKPRRKNPQEGLYNELQKDKMAEAYSEIGMKGERRRGKGHDGLYQGLSTATKDTYDALHMQALPPR

SEQ ID NO: 8 - protein, 241 aa, Artificial Sequence
  Synthetic construct
DVQMTQSPSSLSASVGDRVTITCRASQSISDYLSWYQQRPGKAPNLLIYAASNLKTGVPSRFSGSGSGTDFTLTISTLQPEDFATYYCQQSYRSPWTFGQGTKVEIKGGGGSGGGGSGGGGSEVQLVESGGGLVKPGGSLRLSCAASGFTYSNAWMSWVRQAPGKGLEWVGRIKSKTDGGTTDYAAPVQGRFTISRDDSKNTLYLQMNSLKTEDTAVYYCTIFGVVSFDYWGQGTLVTVSS

SEQ ID NO: 9 - protein, 464 aa, Artificial Sequence
  Synthetic construct
DVQMTQSPSSLSASVGDRVTITCRASQSISDYLSWYQQRPGKAPNLLIYAASNLKTGVPSRFSGSGSGTDFTLTISTLQPEDFATYYCQQSYRSPWTFGQGTKVEIKGGGGSGGGGSGGGGSEVQLVESGGGLVKPGGSLRLSCAASGFTYSNAWMSWVRQAPGKGLEWVGRIKSKTDGGTTDYAAPVQGRFTISRDDSKNTLYLQMNSLKTEDTAVYYCTIFGVVSFDYWGQGTLVTVSSTTTPAPRPPTPAPTIASQPLSLRPEACRPAAGGAVHTRGLDFACDIYIWAPLAGTCGVLLLSLVITLYCKRGRKKLLYIFKQPFMRPVQTTQEEDGCSCRFPEEEEGGCELRVKFSRSADAPAYQQGQNQLYNELNLGRREEYDVLDKRRGRDPEMGGKPRRKNPQEGLYNELQKDKMAEAYSEIGMKGERRRGKGHDGLYQGLSTATKDTYDALHMQALPPR

SEQ ID NO: 10 - protein, 463 aa, Artificial Sequence
  Synthetic construct
DVQMTQSPSSLSASVGDRVTITCRASQSISDYLSWYQQRPGKAPNLLIYAASNLKTGVPSRFSGSGSGTDFTLTISTLQPEDFATYYCQQSYRSPWTFGQGTKVEIKGGGGSGGGGSGGGGSEVQLVESGGGLVKPGGSLRLSCAASGFTYSNAWMSWVRQAPGKGLEWVGRIKSKTDGGTTDYAAPVQGRFTISRDDSKNTLYLQMNSLKTEDTAVYYCTIFGVVSFDYWGQGTLVTVSSAAAIEVMYPPPYLDNEKSNGTIIHVKGKHLCPSPLFPGPSKPFWVLVVVGGVLACYSLLVTVAFIIFWVRSKRSRLLHSDYMNMTPRRPGPTRKHYQPYAPPRDFAAYRSRVKFSRSADAPAYQQGQNQLYNELNLGRREEYDVLDKRRGRDPEMGGKPRRKNPQEGLYNELQKDKMAEAYSEIGMKGERRRGKGHDGLYQGLSTATKDTYDALHMQALPPR

SEQ ID NO: 11 - protein, 220 aa, Homo sapiens
MASAGMQILGVVLTLLGWVNGLVSCALPMWKVTAFIGNSIVVAQVVWEGLWMSCVVQSTGQMQCKVYDSLLALPQDLQAARALCVIALLVALFGLLVYLAGAKCTTCVEEKDSKARLVLTSGIVFVISGVLTLIPVCWTAHAIIRDFYNPLVAEAQKRELGASLYLGWAASGLLLLGGGLLCCTCPSGGSQGPSHYMARYSTSAPAISRGPSEYPTKNYV

SEQ ID NO: 12 - protein, 239 aa, Artificial Sequence
  Synthetic construct
DIVLTQSPSIMSVSPGEKVTITCSASSSVSYMHWFQQKPGTSPKLSIYSTSNLASGVPARFSGRGSGTSYSLTISRVAAEDAATYYCQQRSNYPPWTFGGGTKLEIKGGGGSGGGGSGGGGSEVQLQQSGPELVKPGASMKISCKASGYSFTGYTMNWVKQSHGKNLEWIGLINPYNGGTIYNQKFKGKATLTVDKSSSTAYMELLSLTSEDSAVYYCARDYGFVLDYWGQGTTLTVSS

SEQ ID NO: 13 - protein, 239 aa, Artificial Sequence
  Synthetic construct
QIVLTQSPAIMSASPGEKVTITCSASSSVSYLHWFQQKPGTSPKLWVYSTSNLPSGVPARFGGSGSGTSYSLTISRMEAEDAATYYCQQRSIYPPWTFGGGTKLEIKGGGGSGGGGSGGGGSEVQLQQSGPELVKPGASMKISCKASGYSFTGYTMNWVKQSHGKNLEWIGLINPYNGGTIYNQKFKGKATLTVDKSSSTAYMELLSLTSEDSAVYYCARDYGFVLDYWGQGTTLTVSS

SEQ ID NO: 14 - protein, 462 aa, Artificial Sequence
  Synthetic construct
DIVLTQSPSIMSVSPGEKVTITCSASSSVSYMHWFQQKPGTSPKLSIYSTSNLASGVPARFSGRGSGTSYSLTISRVAAEDAATYYCQQRSNYPPWTFGGGTKLEIKGGGGSGGGGSGGGGSEVQLQQSGPELVKPGASMKISCKASGYSFTGYTMNWVKQSHGKNLEWIGLINPYNGGTIYNQKFKGKATLTVDKSSSTAYMELLSLTSEDSAVYYCARDYGFVLDYWGQGTTLTVSSTTTPAPRPPTPAPTIASQPLSLRPEACRPAAGGAVHTRGLDFACDIYIWAPLAGTCGVLLLSLVITLYCKRGRKKLLYIFKQPFMRPVQTTQEEDGCSCRFPEEEEGGCELRVKFSRSADAPAYQQGQNQLYNELNLGRREEYDVLDKRRGRDPEMGGKPRRKNPQEGLYNELQKDKMAEAYSEIGMKGERRRGKGHDGLYQGLSTATKDTYDALHMQALPPR

SEQ ID NO: 15 - protein, 580 aa, Homo sapiens
MAGTVRTACLVVAMLLSLDFPGQAQPPPPPPDATCHQVRSFFQRLQPGLKWVPETPVPGSDLQVCLPKGPTCCSRKMEEKYQLTARLNMEQLLQSASMELKFLIIQNAAVFQEAFEIVVRHAKNYTNAMFKNNYPSLTPQAFEFVGEFFTDVSLYILGSDINVDDMVNELFDSLFPVIYTQLMNPGLPDSALDINECLRGARRDLKVFGNFPKLIMTQVSKSLQVTRIFLQALNLGIEVINTTDHLKFSKDCGRMLTRMWYCSYCQGLMMVKPCGGYCNVVMQGCMAGVVEIDKYWREYILSLEELVNGMYRIYDMENVLLGLFSTIHDSIQYVQKNAGKLTTTIGKLCAHSQQRQYRSAYYPEDLFIDKKVLKVAHVEHEETLSSRRRELIQKLKSFISFYSALPGYICSHSPVAENDTLCWNGQELVERYSQKAARNGMKNQFNLHELKMKGPEPVVSQIIDKLKHINQLLRTMSMPKGRVLDKNLDEEGFESGDCGDDEDECIGGSGDGMIKVKNQLRFLAELAYDLDVDDAPGNSQQATPKDNEISTFHNLGNVHSPLKLLTSMAISVVCFFFLVH

SEQ ID NO: 16 - protein, 242 aa, Artificial Sequence
  Synthetic construct
DVVMTQSPLSLPVTPGEPASISCRSSQSLVHSNANTYLHWYLQKPGQSPQLLIYKVSNRFSGVPDRFSGSGSGTDFTLKISRVEAEDVGVYYCSQNTHVPPTFGQGTKLEIKGGGGSGGGGSGGGGSQVQLVQSGAEVKKPGASVKVSCKASGYTFTDYEMHWVRQAPGQGLEWMGALDPKTGDTAYSQKFKGRVTLTADESTSTAYMELSSLRSEDTAVYYCTRFYSYTYWGQGTLVTVSS

SEQ ID NO: 17 - protein, 465 aa, Artificial Sequence
  Synthetic construct
DVVMTQSPLSLPVTPGEPASISCRSSQSLVHSNANTYLHWYLQKPGQSPQLLIYKVSNRFSGVPDRFSGSGSGTDFTLKISRVEAEDVGVYYCSQNTHVPPTFGQGTKLEIKGGGGSGGGGSGGGGSQVQLVQSGAEVKKPGASVKVSCKASGYTFTDYEMHWVRQAPGQGLEWMGALDPKTGDTAYSQKFKGRVTLTADESTSTAYMELSSLRSEDTAVYYCTRFYSYTYWGQGTLVTVSSTTTPAPRPPTPAPTIASQPLSLRPEACRPAAGGAVHTRGLDFACDIYIWAPLAGTCGVLLLSLVITLYCKRGRKKLLYIFKQPFMRPVQTTQEEDGCSCRFPEEEEGGCELRVKFSRSADAPAYQQGQNQLYNELNLGRREEYDVLDKRRGRDPEMGGKPRRKNPQEGLYNELQKDKMAEAYSEIGMKGERRRGKGHDGLYQGLSTATKDTYDALHMQALPPR

SEQ ID NO: 18 - protein, 464 aa, Artificial Sequence
  Synthetic construct
DVVMTQSPLSLPVTPGEPASISCRSSQSLVHSNANTYLHWYLQKPGQSPQLLIYKVSNRFSGVPDRFSGSGSGTDFTLKISRVEAEDVGVYYCSQNTHVPPTFGQGTKLEIKGGGGSGGGGSGGGGSQVQLVQSGAEVKKPGASVKVSCKASGYTFTDYEMHWVRQAPGQGLEWMGALDPKTGDTAYSQKFKGRVTLTADESTSTAYMELSSLRSEDTAVYYCTRFYSYTYWGQGTLVTVSSAAAIEVMYPPPYLDNEKSNGTIIHVKGKHLCPSPLFPGPSKPFWVLVVVGGVLACYSLLVTVAFIIFWVRSKRSRLLHSDYMNMTPRRPGPTRKHYQPYAPPRDFAAYRSRVKFSRSADAPAYQQGQNQLYNELNLGRREEYDVLDKRRGRDPEMGGKPRRKNPQEGLYNELQKDKMAEAYSEIGMKGERRRGKGHDGLYQGLSTATKDTYDALHMQALPPR

SEQ ID NO: 19 - protein, 242 aa, Artificial Sequence
  Synthetic construct
QVQLVQSGAEVKKPGASVKVSCKASGYTFTDYEMHWVRQAPGQGLEWMGALDPKTGDTAYSQKFKGRVTLTADKSTSTAYMELSSLTSEDTAVYYCTRFYSYTYWGQGTLVTVSSGGGGSGGGGSGGGGSDVVMTQSPLSLPVTPGEPASISCRSSQSLVHSNRNTYLHWYLQKPGQSPQLLIYKVSNRFSGVPDRFSGSGSGTDFTLKISRVEAEDVGVYYCSQNTHVPPTFGQGTKLEIK

SEQ ID NO: 20 - protein, 465 aa, Artificial Sequence
  Synthetic construct
QVQLVQSGAEVKKPGASVKVSCKASGYTFTDYEMHWVRQAPGQGLEWMGALDPKTGDTAYSQKFKGRVTLTADKSTSTAYMELSSLTSEDTAVYYCTRFYSYTYWGQGTLVTVSSGGGGSGGGGSGGGGSDVVMTQSPLSLPVTPGEPASISCRSSQSLVHSNRNTYLHWYLQKPGQSPQLLIYKVSNRFSGVPDRFSGSGSGTDFTLKISRVEAEDVGVYYCSQNTHVPPTFGQGTKLEIKTTTPAPRPPTPAPTIASQPLSLRPEACRPAAGGAVHTRGLDFACDIYIWAPLAGTCGVLLLSLVITLYCKRGRKKLLYIFKQPFMRPVQTTQEEDGCSCRFPEEEEGGCELRVKFSRSADAPAYQQGQNQLYNELNLGRREEYDVLDKRRGRDPEMGGKPRRKNPQEGLYNELQKDKMAEAYSEIGMKGERRRGKGHDGLYQGLSTATKDTYDALHMQALPPR

SEQ ID NO: 21 - protein, 464 aa, Artificial Sequence
  Synthetic construct
QVQLVQSGAEVKKPGASVKVSCKASGYTFTDYEMHWVRQAPGQGLEWMGALDPKTGDTAYSQKFKGRVTLTADKSTSTAYMELSSLTSEDTAVYYCTRFYSYTYWGQGTLVTVSSGGGGSGGGGSGGGGSDVVMTQSPLSLPVTPGEPASISCRSSQSLVHSNRNTYLHWYLQKPGQSPQLLIYKVSNRFSGVPDRFSGSGSGTDFTLKISRVEAEDVGVYYCSQNTHVPPTFGQGTKLEIKAAAIEVMYPPPYLDNEKSNGTIIHVKGKHLCPSPLFPGPSKPFWVLVVVGGVLACYSLLVTVAFIIFWVRSKRSRLLHSDYMNMTPRRPGPTRKHYQPYAPPRDFAAYRSRVKFSRSADAPAYQQGQNQLYNELNLGRREEYDVLDKRRGRDPEMGGKPRRKNPQEGLYNELQKDKMAEAYSEIGMKGERRRGKGHDGLYQGLSTATKDTYDALHMQALPPR

SEQ ID NO: 22 - protein, 630 aa, Homo sapiens
MALPTARPLLGSCGTPALGSLLFLLFSLGWVQPSRTLAGETGQEAAPLDGVLANPPNISSLSPRQLLGFPCAEVSGLSTERVRELAVALAQKNVKLSTEQLRCLAHRLSEPPEDLDALPLDLLLFLNPDAFSGPQACTRFFSRITKANVDLLPRGAPERQRLLPAALACWGVRGSLLSEADVRALGGLACDLPGRFVAESAEVLLPRLVSCPGPLDQDQQEAARAALQGGGPPYGPPSTWSVSTMDALRGLLPVLGQPIIRSIPQGIVAAWRQRSSRDPSWRQPERTILRPRFRREVEKTACPSGKKAREIDESLIFYKKWELEACVDAALLATQMDRVNAIPFTYEQLDVLKHKLDELYPQGYPESVIQHLGYLFLKMSPEDIRKWNVTSLETLKALLEVNKGHEMSPQAPRRPLPQVATLIDRFVKGRGQLDKDTLDTLTAFYPGYLCSLSPEELSSVPPSSIWAVRPQDLDTCDPRQLDVLYPKARLAFQNMNGSEYFVKIQSFLGGAPTEDLKALSQQNVSMDLATFMKLRTDAVLPLTVAEVQKLLGPHVEGLKAEERHRPVRDWILRQRQDDLDTLGLGLQGGIPNGYLVLDLSMQEALSGTPCLLGPGPVLTVLALLLASTLA

SEQ ID NO: 23 - protein, 241 aa, Artificial Sequence
  Synthetic construct
QVQLVQSGAEVEKPGASVKVSCKASGYTFTDYYMHWVRQAPGQGLEWMGWINPNSGGTNYAQKFQGRVTMTRDTSISTAYMELSRLRSDDTAVYYCASGWDFDYWGQGTLVTVSSGGGGSGGGGSGGGGSGGGGSDIVMTQSPSSLSASVGDRVTITCRASQSIRYYLSWYQQKPGKAPKLLIYTASILQNGVPSRFSGSGSGTDFTLTISSLQPEDFATYYCLQTYTTPDFGPGTKVEIK

SEQ ID NO: 24 - protein, 464 aa, Artificial Sequence
  Synthetic construct
QVQLVQSGAEVEKPGASVKVSCKASGYTFTDYYMHWVRQAPGQGLEWMGWINPNSGGTNYAQKFQGRVTMTRDTSISTAYMELSRLRSDDTAVYYCASGWDFDYWGQGTLVTVSSGGGGSGGGGSGGGGSGGGGSDIVMTQSPSSLSASVGDRVTITCRASQSIRYYLSWYQQKPGKAPKLLIYTASILQNGVPSRFSGSGSGTDFTLTISSLQPEDFATYYCLQTYTTPDFGPGTKVEIKTTTPAPRPPTPAPTIASQPLSLRPEACRPAAGGAVHTRGLDFACDIYIWAPLAGTCGVLLLSLVITLYCKRGRKKLLYIFKQPFMRPVQTTQEEDGCSCRFPEEEEGGCELRVKFSRSADAPAYQQGQNQLYNELNLGRREEYDVLDKRRGRDPEMGGKPRRKNPQEGLYNELQKDKMAEAYSEIGMKGERRRGKGHDGLYQGLSTATKDTYDALHMQALPPR

SEQ ID NO: 25 - protein, 463 aa, Artificial Sequence
  Synthetic construct
QVQLVQSGAEVEKPGASVKVSCKASGYTFTDYYMHWVRQAPGQGLEWMGWINPNSGGTNYAQKFQGRVTMTRDTSISTAYMELSRLRSDDTAVYYCASGWDFDYWGQGTLVTVSSGGGGSGGGGSGGGGSGGGGSDIVMTQSPSSLSASVGDRVTITCRASQSIRYYLSWYQQKPGKAPKLLIYTASILQNGVPSRFSGSGSGTDFTLTISSLQPEDFATYYCLQTYTTPDFGPGTKVEIKAAAIEVMYPPPYLDNEKSNGTIIHVKGKHLCPSPLFPGPSKPFWVLVVVGGVLACYSLLVTVAFIIFWVRSKRSRLLHSDYMNMTPRRPGPTRKHYQPYAPPRDFAAYRSRVKFSRSADAPAYQQGQNQLYNELNLGRREEYDVLDKRRGRDPEMGGKPRRKNPQEGLYNELQKDKMAEAYSEIGMKGERRRGKGHDGLYQGLSTATKDTYDALHMQALPPR

SEQ ID NO: 26 - protein, 236 aa, Artificial Sequence
  Synthetic construct
DIVMTQSPSSLSASVGDRVTITCRASQSIRYYLSWYQQKPGKAPKLLIYTASILQNGVPSRFSGSGSGTDFTLTISSLQPEDFATYYCLQTYTTPDFGPGTKVEIKGGGGSGGGGSGGGGSQVQLVQSGAEVEKPGASVKVSCKASGYTFTDYYMHWVRQAPGQGLEWMGWINPNSGGTNYAQKFQGRVTMTRDTSISTAYMELSRLRSDDTAVYYCASGWDFDYWGQGTLVTVSS

SEQ ID NO: 27 - protein, 459 aa, Artificial Sequence
  Synthetic construct
DIVMTQSPSSLSASVGDRVTITCRASQSIRYYLSWYQQKPGKAPKLLIYTASILQNGVPSRFSGSGSGTDFTLTISSLQPEDFATYYCLQTYTTPDFGPGTKVEIKGGGGSGGGGSGGGGSQVQLVQSGAEVEKPGASVKVSCKASGYTFTDYYMHWVRQAPGQGLEWMGWINPNSGGTNYAQKFQGRVTMTRDTSISTAYMELSRLRSDDTAVYYCASGWDFDYWGQGTLVTVSSTTTPAPRPPTPAPTIASQPLSLRPEACRPAAGGAVHTRGLDFACDIYIWAPLAGTCGVLLLSLVITLYCKRGRKKLLYIFKQPFMRPVQTTQEEDGCSCRFPEEEEGGCELRVKFSRSADAPAYQQGQNQLYNELNLGRREEYDVLDKRRGRDPEMGGKPRRKNPQEGLYNELQKDKMAEAYSEIGMKGERRRGKGHDGLYQGLSTATKDTYDALHMQALPPR

SEQ ID NO: 28 - protein, 458 aa, Artificial Sequence
  Synthetic construct
DIVMTQSPSSLSASVGDRVTITCRASQSIRYYLSWYQQKPGKAPKLLIYTASILQNGVPSRFSGSGSGTDFTLTISSLQPEDFATYYCLQTYTTPDFGPGTKVEIKGGGGSGGGGSGGGGSQVQLVQSGAEVEKPGASVKVSCKASGYTFTDYYMHWVRQAPGQGLEWMGWINPNSGGTNYAQKFQGRVTMTRDTSISTAYMELSRLRSDDTAVYYCASGWDFDYWGQGTLVTVSSAAAIEVMYPPPYLDNEKSNGTIIHVKGKHLCPSPLFPGPSKPFWVLVVVGGVLACYSLLVTVAFIIFWVRSKRSRLLHSDYMNMTPRRPGPTRKHYQPYAPPRDFAAYRSRVKFSRSADAPAYQQGQNQLYNELNLGRREEYDVLDKRRGRDPEMGGKPRRKNPQEGLYNELQKDKMAEAYSEIGMKGERRRGKGHDGLYQGLSTATKDTYDALHMQALPPR

SEQ ID NO: 29 - protein, 115 aa, Homo sapiens
MRVDRVAIYEEFLRMTRNGTQLQNFTLDRSSVLVDGYSPNRNEPLTGNSDLPFWAVILIGLAGLLGVITCLICGVLVTTRRRKKEGEYNVQQQCPGYYQSHLDLEDLQNFSPLAR

SEQ ID NO: 30 - protein, 250 aa, Artificial Sequence
  Synthetic construct
VKLEESGGGFVKPGGSLKISCAASGFTFRNYAMSWVRLSPEMRLEWVATISSAGGYIFYSDSVQGRFTISRDNAKNTLHLQMGSLRSGDTAMYYCARQGFGNYGDYYAMDYWGQGTTVTVSSGGGGSGGGGSGGGGSDIELTQSPSSLAVSAGEKVTMSCKSSQSLLNSRTRKNQLAWYQQKTGQSPELLIYWASTRQSGVPDRFTGSGSGTDFTLTISSVQAEDLAVYYCQQSYNLLTFGPGTKLEIKR

SEQ ID NO: 31 - protein, 473 aa, Artificial Sequence
  Synthetic construct
VKLEESGGGFVKPGGSLKISCAASGFTFRNYAMSWVRLSPEMRLEWVATISSAGGYIFYSDSVQGRFTISRDNAKNTLHLQMGSLRSGDTAMYYCARQGFGNYGDYYAMDYWGQGTTVTVSSGGGGSGGGGSGGGGSDIELTQSPSSLAVSAGEKVTMSCKSSQSLLNSRTRKNQLAWYQQKTGQSPELLIYWASTRQSGVPDRFTGSGSGTDFTLTISSVQAEDLAVYYCQQSYNLLTFGPGTKLEIKRTTTPAPRPPTPAPTIASQPLSLRPEACRPAAGGAVHTRGLDFACDIYIWAPLAGTCGVLLLSLVITLYCKRGRKKLLYIFKQPFMRPVQTTQEEDGCSCRFPEEEEGGCELRVKFSRSADAPAYQQGQNQLYNELNLGRREEYDVLDKRRGRDPEMGGKPRRKNPQEGLYNELQKDKMAEAYSEIGMKGERRRGKGHDGLYQGLSTATKDTYDALHMQALPPR

SEQ ID NO: 32 - protein, 472 aa, Artificial Sequence
  Synthetic construct
VKLEESGGGFVKPGGSLKISCAASGFTFRNYAMSWVRLSPEMRLEWVATISSAGGYIFYSDSVQGRFTISRDNAKNTLHLQMGSLRSGDTAMYYCARQGFGNYGDYYAMDYWGQGTTVTVSSGGGGSGGGGSGGGGSDIELTQSPSSLAVSAGEKVTMSCKSSQSLLNSRTRKNQLAWYQQKTGQSPELLIYWASTRQSGVPDRFTGSGSGTDFTLTISSVQAEDLAVYYCQQSYNLLTFGPGTKLEIKRAAAIEVMYPPPYLDNEKSNGTIIHVKGKHLCPSPLFPGPSKPFWVLVVVGGVLACYSLLVTVAFIIFWVRSKRSRLLHSDYMNMTPRRPGPTRKHYQPYAPPRDFAAYRSRVKFSRSADAPAYQQGQNQLYNELNLGRREEYDVLDKRRGRDPEMGGKPRRKNPQEGLYNELQKDKMAEAYSEIGMKGERRRGKGHDGLYQGLSTATKDTYDALHMQALPPR

SEQ ID NO: 33 - protein, 937 aa, Homo sapiens
MHRPRRRGTRPPLLALLAALLLAARGAAAQETELSVSAELVPTSSWNISSELNKDSYLTLDEPMNNITTSLGQTAELHCKVSGNPPPTIRWFKNDAPVVQEPRRLSFRSTIYGSRLRIRNLDTTDTGYFQCVATNGKEVVSSTGVLFVKFGPPPTASPGYSDEYEEDGFCQPYRGIACARFIGNRTVYMESLHMQGEIENQITAAFTMIGTSSHLSDKCSQFAIPSLCHYAFPYCDETSSVPKPRDLCRDECEILENVLCQTEYIFARSNPMILMRLKLPNCEDLPQPESPEAANCIRIGIPMADPINKNHKCYNSTGVDYRGTVSVTKSGRQCQPWNSQYPHTHTFTALRFPELNGGHSYCRNPGNQKEAPWCFTLDENFKSDLCDIPACDSKDSKEKNKMEILYILVPSVAIPLAIALLFFFICVCRNNQKSSSAPVQRQPKHVRGQNVEMSMLNAYKPKSKAKELPLSAVRFMEELGECAFGKIYKGHLYLPGMDHAQLVAIKTLKDYNNPQQWTEFQQEASLMAELHHPNIVCLLGAVTQEQPVCMLFEYINQGDLHEFLIMRSPHSDVGCSSDEDGTVKSSLDHGDFLHIAIQIAAGMEYLSSHFFVHKDLAARNILIGEQLHVKISDLGLSREIYSADYYRVQSKSLLPIRWMPPEAIMYGKFSSDSDIWSFGVVLWEIFSFGLQPYYGFSNQEVIEMVRKRQLLPCSEDCPPRMYSLMTECWNEIPSRRPRFKDIHVRLRSWEGLSSHTSSTTPSGGNATTQTTSLSASPVSNLSNPRYPNYMFPSQGITPQGQIAGFIGPPIPQNQRFIPINGYPIPPGYAAFPAAHYQPTGPPRVIQHCPPPKSRSPSSASGSTSTGHVTSLPSSGSNQEANIPLLPHMSIPNHPGGMGITVFGNKSQKPYKIDSKQASLLGDANIHGHTESMISAEL

SEQ ID NO: 34 - protein, 240 aa, Artificial Sequence
  Synthetic construct
EVQLVQSGAEVKKPGASVKVSCKASGYTFSDYEMHWVRQAPGQGLEWLGAIDPETGGTAYNQKFKGRVTMTGDTSISTAYMELSRLTSDDTAVYYCTGYYDYDSFTYWGQGTLVSVSSGGGGSGGGGSGGGGSDIQMTQSPSSLSTSVGDRVTITCKASQNVDAAVAWYQQKPGKAPKLLIYSASNRYTGVASRFSGSGSGTDFTFTISSLQSEDLADYFCQQYDIYPYTFGQGTKLEIK

SEQ ID NO: 35 - protein, 463 aa, Artificial Sequence
  Synthetic construct
EVQLVQSGAEVKKPGASVKVSCKASGYTFSDYEMHWVRQAPGQGLEWLGAIDPETGGTAYNQKFKGRVTMTGDTSISTAYMELSRLTSDDTAVYYCTGYYDYDSFTYWGQGTLVSVSSGGGGSGGGGSGGGGSDIQMTQSPSSLSTSVGDRVTITCKASQNVDAAVAWYQQKPGKAPKLLIYSASNRYTGVASRFSGSGSGTDFTFTISSLQSEDLADYFCQQYDIYPYTFGQGTKLEIKTTTPAPRPPTPAPTIASQPLSLRPEACRPAAGGAVHTRGLDFACDIYIWAPLAGTCGVLLLSLVITLYCKRGRKKLLYIFKQPFMRPVQTTQEEDGCSCRFPEEEEGGCELRVKFSRSADAPAYQQGQNQLYNELNLGRREEYDVLDKRRGRDPEMGGKPRRKNPQEGLYNELQKDKMAEAYSEIGMKGERRRGKGHDGLYQGLSTATKDTYDALHMQALPPR

SEQ ID NO: 36 - protein, 462 aa, Artificial Sequence
  Synthetic construct
EVQLVQSGAEVKKPGASVKVSCKASGYTFSDYEMHWVRQAPGQGLEWLGAIDPETGGTAYNQKFKGRVTMTGDTSISTAYMELSRLTSDDTAVYYCTGYYDYDSFTYWGQGTLVSVSSGGGGSGGGGSGGGGSDIQMTQSPSSLSTSVGDRVTITCKASQNVDAAVAWYQQKPGKAPKLLIYSASNRYTGVASRFSGSGSGTDFTFTISSLQSEDLADYFCQQYDIYPYTFGQGTKLEIKAAAIEVMYPPPYLDNEKSNGTIIHVKGKHLCPSPLFPGPSKPFWVLVVVGGVLACYSLLVTVAFIIFWVRSKRSRLLHSDYMNMTPRRPGPTRKHYQPYAPPRDFAAYRSRVKFSRSADAPAYQQGQNQLYNELNLGRREEYDVLDKRRGRDPEMGGKPRRKNPQEGLYNELQKDKMAEAYSEIGMKGERRRGKGHDGLYQGLSTATKDTYDALHMQALPPR

SEQ ID NO: 37 - protein, 909 aa, Homo sapiens
MAARPLPVSPARALLLALAGALLAPCEARGVSLWNQGRADEVVSASVGSGDLWIPVKSFDSKNHPEVLNIRLQRESKELIINLERNEGLIASSFTETHYLQDGTDVSLARNYTVILGHCYYHGHVRGYSDSAVSLSTCSGLRGLIVFENESYVLEPMKSATNRYKLFPAKKLKSVRGSCGSHHNTPNLAAKNVFPPPSQTWARRHKRETLKATKYVELVIVADNREFQRQGKDLEKVKQRLIEIANHVDKFYRPLNIRIVLVGVEVWNDMDKCSVSQDPFTSLHEFLDWRKMKLLPRKSHDNAQLVSGVYFQGTTIGMAPIMSMCTADQSGGIVMDHSDNPLGAAVTLAHELGHNFGMNHDTLDRGCSCQMAVEKGGCIMNASTGYPFPMVFSSCSRKDLETSLEKGMGVCLFNLPEVRESFGGQKCGNRFVEEGEECDCGEPEECMNRCCNATTCTLKPDAVCAHGLCCEDCQLKPAGTACRDSSNSCDLPEFCTGASPHCPANVYLHDGHSCQDVDGYCYNGICQTHEQQCVTLWGPGAKPAPGICFERVNSAGDPYGNCGKVSKSSFAKCEMRDAKCGKIQCQGGASRPVIGTNAVSIETNIPLQQGGRILCRGTHVYLGDDMPDPGLVLAGTKCADGKICLNRQCQNISVFGVHECAMQCHGRGVCNNRKNCHCEAHWAPPFCDKFGFGGSTDSGPIRQADNQGLTIGILVTILCLLAAGFVVYLKRKTLIRLLFTNKKTTIEKLRCVRPSRPPRGFQPCQAHLGHLGKGLMRKPPDSYPPKDNPRRLLQCQNVDISRPLNGLNVPQPQSTQRVLPPLHRAPRAPSVPARPLPAKPALRQAQGTCKPNPPQKPLPADPLARTTRLTHALARTPGQWETGLRLAPLRPAPQYPHQVPRSTHTAYIK

SEQ ID NO: 38 - protein, 263 aa, Artificial Sequence
  Synthetic construct
MLGPCMLLLLLLLGLRLQSALTQPASVSGSPGQSITISCTGTSSDVGGYNYVSWYQQHPGKAPKVMIYDVTNRPSGVSNRFSGSKSGNTASLTISGLQAEDEADYYCSSYTIASTLVVFGGGTKLTVLGGGGSGGGGSGGGGSQVQLQQSGGGLVKPGGSLRLSCAASGFTFSSYAMHWVRQAPGKGLEWVAVISYDGSNKYYADSVKGRFTISRDNSKNTLYLQMDSLRAEDTAVYYCAKEGDSSRWSYDLWGRGTLVTVSS

SEQ ID NO: 39 - protein, 486 aa, Artificial Sequence
  Synthetic construct
MLGPCMLLLLLLLGLRLQSALTQPASVSGSPGQSITISCTGTSSDVGGYNYVSWYQQHPGKAPKVMIYDVTNRPSGVSNRFSGSKSGNTASLTISGLQAEDEADYYCSSYTIASTLVVFGGGTKLTVLGGGGSGGGGSGGGGSQVQLQQSGGGLVKPGGSLRLSCAASGFTFSSYAMHWVRQAPGKGLEWVAVISYDGSNKYYADSVKGRFTISRDNSKNTLYLQMDSLRAEDTAVYYCAKEGDSSRWSYDLWGRGTLVTVSSTTTPAPRPPTPAPTIASQPLSLRPEACRPAAGGAVHTRGLDFACDIYIWAPLAGTCGVLLLSLVITLYCKRGRKKLLYIFKQPFMRPVQTTQEEDGCSCRFPEEEEGGCELRVKFSRSADAPAYQQGQNQLYNELNLGRREEYDVLDKRRGRDPEMGGKPRRKNPQEGLYNELQKDKMAEAYSEIGMKGERRRGKGHDGLYQGLSTATKDTYDALHMQALPPR

SEQ ID NO: 40 - protein, 485 aa, Artificial Sequence
  Synthetic construct
MLGPCMLLLLLLLGLRLQSALTQPASVSGSPGQSITISCTGTSSDVGGYNYVSWYQQHPGKAPKVMIYDVTNRPSGVSNRFSGSKSGNTASLTISGLQAEDEADYYCSSYTIASTLVVFGGGTKLTVLGGGGSGGGGSGGGGSQVQLQQSGGGLVKPGGSLRLSCAASGFTFSSYAMHWVRQAPGKGLEWVAVISYDGSNKYYADSVKGRFTISRDNSKNTLYLQMDSLRAEDTAVYYCAKEGDSSRWSYDLWGRGTLVTVSSAAAIEVMYPPPYLDNEKSNGTIIHVKGKHLCPSPLFPGPSKPFWVLVVVGGVLACYSLLVTVAFIIFWVRSKRSRLLHSDYMNMTPRRPGPTRKHYQPYAPPRDFAAYRSRVKFSRSADAPAYQQGQNQLYNELNLGRREEYDVLDKRRGRDPEMGGKPRRKNPQEGLYNELQKDKMAEAYSEIGMKGERRRGKGHDGLYQGLSTATKDTYDALHMQALPPR

SEQ ID NO: 41 - protein, 506 aa, Homo sapiens
MLGPCMLLLLLLLGLRLQLSLGIIPVEEENPDFWNREAAEALGAAKKLQPAQTAAKNLIIFLGDGMGVSTVTAARILKGQKKDKLGPEIPLAMDRFPYVALSKTYNVDKHVPDSGATATAYLCGVKGNFQTIGLSAAARFNQCNTTRGNEVISVMNRAKKAGKSVGVVTTTRVQHASPAGTYAHTVNRNWYSDADVPASARQEGCQDIATQLISNMDIDVILGGGRKYMFRMGTPDPEYPDDYSQGGTRLDGKNLVQEWLAKRQGARYVWNRTELMQASLDPSVTHLMGLFEPGDMKYEIHRDSTLDPSLMEMTEAALRLLSRNPRGFFLFVEGGRIDHGHHESRAYRALTETIMFDDAIERAGQLTSEEDTLSLVTADHSHVFSFGGYPLRGSSIFGLAPGKARDRKAYTVLLYGNGPGYVLKDGARPDVTESESGSPEYRQQSAVPLDEETHAGEDVAVFARGPQAHLVHGVQEQTFIAHVMAFAACLEPYTACDLAPPAGTTD

SEQ ID NO: 42 - protein, 246 aa, Artificial Sequence
  Synthetic construct
QSALTQPASVSGSPGQSITISCTGTSSDVGGYNYVSWYQQHPGKAPKVMIYDVTNRPSGVSNRFSGSKSGNTASLTISGLQAEDEADYYCSSYTIASTLVVFGGGTKLTVLGGGGSGGGGSGGGGSQVQLQQSGGGLVKPGGSLRLSCAASGFTFSSYAMHWVRQAPGKGLEWVAVISYDGSNKYYADSVKGRFTISRDNSKNTLYLQMDSLRAEDTAVYYCAKEGDSSRWSYDLWGRGTLVTVSS

SEQ ID NO: 43 - protein, 469 aa, Artificial Sequence
  Synthetic construct
QSALTQPASVSGSPGQSITISCTGTSSDVGGYNYVSWYQQHPGKAPKVMIYDVTNRPSGVSNRFSGSKSGNTASLTISGLQAEDEADYYCSSYTIASTLVVFGGGTKLTVLGGGGSGGGGSGGGGSQVQLQQSGGGLVKPGGSLRLSCAASGFTFSSYAMHWVRQAPGKGLEWVAVISYDGSNKYYADSVKGRFTISRDNSKNTLYLQMDSLRAEDTAVYYCAKEGDSSRWSYDLWGRGTLVTVSSTTTPAPRPPTPAPTIASQPLSLRPEACRPAAGGAVHTRGLDFACDIYIWAPLAGTCGVLLLSLVITLYCKRGRKKLLYIFKQPFMRPVQTTQEEDGCSCRFPEEEEGGCELRVKFSRSADAPAYQQGQNQLYNELNLGRREEYDVLDKRRGRDPEMGGKPRRKNPQEGLYNELQKDKMAEAYSEIGMKGERRRGKGHDGLYQGLSTATKDTYDALHMQALPPR

SEQ ID NO: 44 - protein, 468 aa, Artificial Sequence
  Synthetic construct
QSALTQPASVSGSPGQSITISCTGTSSDVGGYNYVSWYQQHPGKAPKVMIYDVTNRPSGVSNRFSGSKSGNTASLTISGLQAEDEADYYCSSYTIASTLVVFGGGTKLTVLGGGGSGGGGSGGGGSQVQLQQSGGGLVKPGGSLRLSCAASGFTFSSYAMHWVRQAPGKGLEWVAVISYDGSNKYYADSVKGRFTISRDNSKNTLYLQMDSLRAEDTAVYYCAKEGDSSRWSYDLWGRGTLVTVSSAAAIEVMYPPPYLDNEKSNGTIIHVKGKHLCPSPLFPGPSKPFWVLVVVGGVLACYSLLVTVAFIIFWVRSKRSRLLHSDYMNMTPRRPGPTRKHYQPYAPPRDFAAYRSRVKFSRSADAPAYQQGQNQLYNELNLGRREEYDVLDKRRGRDPEMGGKPRRKNPQEGLYNELQKDKMAEAYSEIGMKGERRRGKGHDGLYQGLSTATKDTYDALHMQALPPR

SEQ ID NO: 45 - protein, 261 aa, Homo sapiens
MAVTACQGLGFVVSLIGIAGIIAATCMDQWSTQDLYNNPVTAVFNYQGLWRSCVRESSGFTECRGYFTLLGLPAMLQAVRALMIVGIVLGAIGLLVSIFALKCIRIGSMEDSAKANMTLTSGIMFIVSGLCAIAGVSVFANMLVTNFWMSTANMYTGMGGMVQTVQTRYTFGAALFVGWVAGGLTLIGGVMMCIACRGLAPEETNYKAVSYHASGHSVAYKPGGFKASTGFGSNTKNKKIYDGGARTEDEVQSYPSKHDYV

SEQ ID NO: 46 - protein, 246 aa, Artificial Sequence
  Synthetic construct
DIVMTQSPSSLTVTAGEKVTMSCKSSQSLLNSGNQKNYLTWYQQKPGQPPKLLIYWASTRESGVPDRFTGSGSGTDFTLTISSVQAEDLAVYYCQNDYSYPFTFGSGTKLEIKGGGGSGGGGSGGGGSQVQLQQPGAELVRPGASVKLSCKASGYTFTSYWINWVKQRPGQGLEWIGNIYPSDSYTNYNQKFKDKATLTVDKSSSTAYMQLSSPTSEDSAVYYCTRSWRGNSFDYWGQGTTLTVSS

SEQ ID NO: 47 - protein, 469 aa, Artificial Sequence
  Synthetic construct
DIVMTQSPSSLTVTAGEKVTMSCKSSQSLLNSGNQKNYLTWYQQKPGQPPKLLIYWASTRESGVPDRFTGSGSGTDFTLTISSVQAEDLAVYYCQNDYSYPFTFGSGTKLEIKGGGGSGGGGSGGGGSQVQLQQPGAELVRPGASVKLSCKASGYTFTSYWINWVKQRPGQGLEWIGNIYPSDSYTNYNQKFKDKATLTVDKSSSTAYMQLSSPTSEDSAVYYCTRSWRGNSFDYWGQGTTLTVSSTTTPAPRPPTPAPTIASQPLSLRPEACRPAAGGAVHTRGLDFACDIYIWAPLAGTCGVLLLSLVITLYCKRGRKKLLYIFKQPFMRPVQTTQEEDGCSCRFPEEEEGGCELRVKFSRSADAPAYQQGQNQLYNELNLGRREEYDVLDKRRGRDPEMGGKPRRKNPQEGLYNELQKDKMAEAYSEIGMKGERRRGKGHDGLYQGLSTATKDTYDALHMQALPPR

SEQ ID NO: 48 - protein, 468 aa, Artificial Sequence
  Synthetic construct
DIVMTQSPSSLTVTAGEKVTMSCKSSQSLLNSGNQKNYLTWYQQKPGQPPKLLIYWASTRESGVPDRFTGSGSGTDFTLTISSVQAEDLAVYYCQNDYSYPFTFGSGTKLEIKGGGGSGGGGSGGGGSQVQLQQPGAELVRPGASVKLSCKASGYTFTSYWINWVKQRPGQGLEWIGNIYPSDSYTNYNQKFKDKATLTVDKSSSTAYMQLSSPTSEDSAVYYCTRSWRGNSFDYWGQGTTLTVSSAAAIEVMYPPPYLDNEKSNGTIIHVKGKHLCPSPLFPGPSKPFWVLVVVGGVLACYSLLVTVAFIIFWVRSKRSRLLHSDYMNMTPRRPGPTRKHYQPYAPPRDFAAYRSRVKFSRSADAPAYQQGQNQLYNELNLGRREEYDVLDKRRGRDPEMGGKPRRKNPQEGLYNELQKDKMAEAYSEIGMKGERRRGKGHDGLYQGLSTATKDTYDALHMQALPPR

SEQ ID NO: 49 - protein, 243 aa, Artificial Sequence
  Synthetic construct
QSVLTQPASVSGSPGQSVTISCTGTSSDVGGYNYVSWYQQHPGKPPKLMIYEVSKRPSGVPDRFSGSKSGNTASLTISGLQAEDEADYYCSSHTSSNTLIFGGGTKVTVLGGGGSGGGGSGGGGSEVQLVQSGAEVKKPGESLKISCKGSGYTFTNYWIGWVRQMPGKGLEWMGRIYPSDSYTNYSPSFQGQVTISADKSISTAYLQWSSLKASDTAMYYCARDLEPTHHYSWGQGTLVTVSS

SEQ ID NO: 50 - protein, 466 aa, Artificial Sequence
  Synthetic construct
QSVLTQPASVSGSPGQSVTISCTGTSSDVGGYNYVSWYQQHPGKPPKLMIYEVSKRPSGVPDRFSGSKSGNTASLTISGLQAEDEADYYCSSHTSSNTLIFGGGTKVTVLGGGGSGGGGSGGGGSEVQLVQSGAEVKKPGESLKISCKGSGYTFTNYWIGWVRQMPGKGLEWMGRIYPSDSYTNYSPSFQGQVTISADKSISTAYLQWSSLKASDTAMYYCARDLEPTHHYSWGQGTLVTVSSTTTPAPRPPTPAPTIASQPLSLRPEACRPAAGGAVHTRGLDFACDIYIWAPLAGTCGVLLLSLVITLYCKRGRKKLLYIFKQPFMRPVQTTQEEDGCSCRFPEEEEGGCELRVKFSRSADAPAYQQGQNQLYNELNLGRREEYDVLDKRRGRDPEMGGKPRRKNPQEGLYNELQKDKMAEAYSEIGMKGERRRGKGHDGLYQGLSTATKDTYDALHMQALPPR

SEQ ID NO: 51 - protein, 465 aa, Artificial Sequence
  Synthetic construct
QSVLTQPASVSGSPGQSVTISCTGTSSDVGGYNYVSWYQQHPGKPPKLMIYEVSKRPSGVPDRFSGSKSGNTASLTISGLQAEDEADYYCSSHTSSNTLIFGGGTKVTVLGGGGSGGGGSGGGGSEVQLVQSGAEVKKPGESLKISCKGSGYTFTNYWIGWVRQMPGKGLEWMGRIYPSDSYTNYSPSFQGQVTISADKSISTAYLQWSSLKASDTAMYYCARDLEPTHHYSWGQGTLVTVSSAAAIEVMYPPPYLDNEKSNGTIIHVKGKHLCPSPLFPGPSKPFWVLVVVGGVLACYSLLVTVAFIIFWVRSKRSRLLHSDYMNMTPRRPGPTRKHYQPYAPPRDFAAYRSRVKFSRSADAPAYQQGQNQLYNELNLGRREEYDVLDKRRGRDPEMGGKPRRKNPQEGLYNELQKDKMAEAYSEIGMKGERRRGKGHDGLYQGLSTATKDTYDALHMQALPPR

SEQ ID NO: 52 - protein, 242 aa, Artificial Sequence
  Synthetic construct
DIQMTQSPASLSASVGERVTITCRASGDIHNYLAWYQQKPGKSPQLLIYNAKTLADGVPSRFSGSGSGTQYTLTINSLQPEDFATYYCQHFWSFPWTFGGGTKLEIKGGGGSGGGGSGGGGSQVLVQSGAEVKKPGASVKVSCKASGYTFTDYNMDWVRQSHGQSLEWMGDINPNTGGTIFNQKFKGRATITVDTSSSTAYMDLHSLTSEDTAVYYCARRTYYGNSYYFDYWGQGTLVTVSS

SEQ ID NO: 53 - protein, 465 aa, Artificial Sequence
  Synthetic construct
DIQMTQSPASLSASVGERVTITCRASGDIHNYLAWYQQKPGKSPQLLIYNAKTLADGVPSRFSGSGSGTQYTLTINSLQPEDFATYYCQHFWSFPWTFGGGTKLEIKGGGGSGGGGSGGGGSQVLVQSGAEVKKPGASVKVSCKASGYTFTDYNMDWVRQSHGQSLEWMGDINPNTGGTIFNQKFKGRATITVDTSSSTAYMDLHSLTSEDTAVYYCARRTYYGNSYYFDYWGQGTLVTVSSTTTPAPRPPTPAPTIASQPLSLRPEACRPAAGGAVHTRGLDFACDIYIWAPLAGTCGVLLLSLVITLYCKRGRKKLLYIFKQPFMRPVQTTQEEDGCSCRFPEEEEGGCELRVKFSRSADAPAYQQGQNQLYNELNLGRREEYDVLDKRRGRDPEMGGKPRRKNPQEGLYNELQKDKMAEAYSEIGMKGERRRGKGHDGLYQGLSTATKDTYDALHMQALPPR

SEQ ID NO: 54 - protein, 464 aa, Artificial Sequence
  Synthetic construct
DIQMTQSPASLSASVGERVTITCRASGDIHNYLAWYQQKPGKSPQLLIYNAKTLADGVPSRFSGSGSGTQYTLTINSLQPEDFATYYCQHFWSFPWTFGGGTKLEIKGGGGSGGGGSGGGGSQVLVQSGAEVKKPGASVKVSCKASGYTFTDYNMDWVRQSHGQSLEWMGDINPNTGGTIFNQKFKGRATITVDTSSSTAYMDLHSLTSEDTAVYYCARRTYYGNSYYFDYWGQGTLVTVSSAAAIEVMYPPPYLDNEKSNGTIIHVKGKHLCPSPLFPGPSKPFWVLVVVGGVLACYSLLVTVAFIIFWVRSKRSRLLHSDYMNMTPRRPGPTRKHYQPYAPPRDFAAYRSRVKFSRSADAPAYQQGQNQLYNELNLGRREEYDVLDKRRGRDPEMGGKPRRKNPQEGLYNELQKDKMAEAYSEIGMKGERRRGKGHDGLYQGLSTATKDTYDALHMQALPPR

SEQ ID NO: 55 - protein, 242 aa, Artificial Sequence
  Synthetic construct
DIVLTQSPATLSVSPGERATLSCRASQGISDYLHWYQQKSGESPRLLIKYASQSMSGIPARFSGSGSGTDFTLTISSLEPEDVAVYYCQNGHTFPLTFGAGTRLEIKGGGGSGGGGSGGGGSQVQLVESGGGVVAPGQSLRLSCTASGFSLSSYGVHWVRQPPGKGLEWVAVIWAGGNTKYNSALMSRFTISRDTSKTTVYLQMNSLETEDTAMYYCATYFGSRHFYSMDYWGQGTLVTVSS

SEQ ID NO: 56 - protein, 465 aa, Artificial Sequence
  Synthetic construct
DIVLTQSPATLSVSPGERATLSCRASQGISDYLHWYQQKSGESPRLLIKYASQSMSGIPARFSGSGSGTDFTLTISSLEPEDVAVYYCQNGHTFPLTFGAGTRLEIKGGGGSGGGGSGGGGSQVQLVESGGGVVAPGQSLRLSCTASGFSLSSYGVHWVRQPPGKGLEWVAVIWAGGNTKYNSALMSRFTISRDTSKTTVYLQMNSLETEDTAMYYCATYFGSRHFYSMDYWGQGTLVTVSSTTTPAPRPPTPAPTIASQPLSLRPEACRPAAGGAVHTRGLDFACDIYIWAPLAGTCGVLLLSLVITLYCKRGRKKLLYIFKQPFMRPVQTTQEEDGCSCRFPEEEEGGCELRVKFSRSADAPAYQQGQNQLYNELNLGRREEYDVLDKRRGRDPEMGGKPRRKNPQEGLYNELQKDKMAEAYSEIGMKGERRRGKGHDGLYQGLSTATKDTYDALHMQALPPR

SEQ ID NO: 57 - protein, 464 aa, Artificial Sequence
  Synthetic construct
DIVLTQSPATLSVSPGERATLSCRASQGISDYLHWYQQKSGESPRLLIKYASQSMSGIPARFSGSGSGTDFTLTISSLEPEDVAVYYCQNGHTFPLTFGAGTRLEIKGGGGSGGGGSGGGGSQVQLVESGGGVVAPGQSLRLSCTASGFSLSSYGVHWVRQPPGKGLEWVAVIWAGGNTKYNSALMSRFTISRDTSKTTVYLQMNSLETEDTAMYYCATYFGSRHFYSMDYWGQGTLVTVSSAAAIEVMYPPPYLDNEKSNGTIIHVKGKHLCPSPLFPGPSKPFWVLVVVGGVLACYSLLVTVAFIIFWVRSKRSRLLHSDYMNMTPRRPGPTRKHYQPYAPPRDFAAYRSRVKFSRSADAPAYQQGQNQLYNELNLGRREEYDVLDKRRGRDPEMGGKPRRKNPQEGLYNELQKDKMAEAYSEIGMKGERRRGKGHDGLYQGLSTATKDTYDALHMQALPPR

SEQ ID NO: 58 - protein, 609 aa, Homo sapiens
MKWVESIFLIFLLNFTESRTLHRNEYGIASILDSYQCTAEISLADLATIFFAQFVQEATYKEVSKMVKDALTAIEKPTGDEQSSGCLENQLPAFLEELCHEKEILEKYGHSDCCSQSEEGRHNCFLAHKKPTPASIPLFQVPEPVTSCEAYEEDRETFMNKFIYEIARRHPFLYAPTILLWAARYDKIIPSCCKAENAVECFQTKAATVTKELRESSLLNQHACAVMKNFGTRTFQAITVTKLSQKFTKVNFTEIQKLVLDVAHVHEHCCRGDVLDCLQDGEKIMSYICSQQDTLSNKITECCKLTTLERGQCIIHAENDEKPEGLSPNLNRFLGDRDFNQFSSGEKNIFLASFVHEYSRRHPQLAVSVILRVAKGYQELLEKCFQTENPLECQDKGEEELQKYIQESQALAKRSCGLFQKLGEYYLQNAFLVAYTKKAPQLTSSELMAITRKMAATAATCCQLSEDKLLACGEGAADIIIGHLCIRHEMTPVNPGVGQCCTSSYANRRPCFSSLVVDETYVPPAFSDDKFIFHKDLCQAQGVALQTMKQEFLINLVKQKPQITEEQLEAVIADFSGLLEKCCQGQEQEVCFAEEGQKLISKTRAALGV

SEQ ID NO: 59 - protein, 245 aa, Artificial Sequence
  Synthetic construct
QAVVTQEPSLTVSPGGTVTLTCGSSTGAVTSGHYPYWFQQKPGQAPRTLIYDASDKHSWTPARFSGSLLGGKAALTLSGAQPEDEAEYYCLLSYSDALVFGGGTKLTVLGGGGGSGGGGSGGGGSEVQLVQSGAEVKKPGASVKVSCKASGYTFTSYGISWVRQAPGQGLEWMGWISAYNGNTNYAQKLQGRVTMTTDTSTSTAYMELRSLRSDDTAVYYCARDSYYYYYGMDVWGQGTTVTVSS

SEQ ID NO: 60 - protein, 468 aa, Artificial Sequence
  Synthetic construct
QAVVTQEPSLTVSPGGTVTLTCGSSTGAVTSGHYPYWFQQKPGQAPRTLIYDASDKHSWTPARFSGSLLGGKAALTLSGAQPEDEAEYYCLLSYSDALVFGGGTKLTVLGGGGGSGGGGSGGGGSEVQLVQSGAEVKKPGASVKVSCKASGYTFTSYGISWVRQAPGQGLEWMGWISAYNGNTNYAQKLQGRVTMTTDTSTSTAYMELRSLRSDDTAVYYCARDSYYYYYGMDVWGQGTTVTVSSTTTPAPRPPTPAPTIASQPLSLRPEACRPAAGGAVHTRGLDFACDIYIWAPLAGTCGVLLLSLVITLYCKRGRKKLLYIFKQPFMRPVQTTQEEDGCSCRFPEEEEGGCELRVKFSRSADAPAYQQGQNQLYNELNLGRREEYDVLDKRRGRDPEMGGKPRRKNPQEGLYNELQKDKMAEAYSEIGMKGERRRGKGHDGLYQGLSTATKDTYDALHMQALPPR

SEQ ID NO: 61 - protein, 467 aa, Artificial Sequence
  Synthetic construct
QAVVTQEPSLTVSPGGTVTLTCGSSTGAVTSGHYPYWFQQKPGQAPRTLIYDASDKHSWTPARFSGSLLGGKAALTLSGAQPEDEAEYYCLLSYSDALVFGGGTKLTVLGGGGGSGGGGSGGGGSEVQLVQSGAEVKKPGASVKVSCKASGYTFTSYGISWVRQAPGQGLEWMGWISAYNGNTNYAQKLQGRVTMTTDTSTSTAYMELRSLRSDDTAVYYCARDSYYYYYGMDVWGQGTTVTVSSAAAIEVMYPPPYLDNEKSNGTIIHVKGKHLCPSPLFPGPSKPFWVLVVVGGVLACYSLLVTVAFIIFWVRSKRSRLLHSDYMNMTPRRPGPTRKHYQPYAPPRDFAAYRSRVKFSRSADAPAYQQGQNQLYNELNLGRREEYDVLDKRRGRDPEMGGKPRRKNPQEGLYNELQKDKMAEAYSEIGMKGERRRGKGHDGLYQGLSTATKDTYDALHMQALPPR

SEQ ID NO: 62 - protein, 243 aa, Artificial Sequence
  Synthetic construct
QSVLTQPASVSGSPGQSITISCTGTSSDVGGYNYVSWYQQHPGKAPKLMIYDVNNRPSEVSNRFSGSKSGNTASLTISGLQAEDEADYYCSSYTTGSRAVFGGGTKLTVLGGGGGSGGGGSGGGGSEVQLVQSGAEVKKPGESLTISCKASGYSFPNYWITWVRQMSGGGLEWMGRIDPGDSYTTYNPSFQGHVTISIDKSTNTAYLHWNSLKASDTAMYYCARYYVSLVDIWGQGTLVTVSS

SEQ ID NO: 63 - protein, 466 aa, Artificial Sequence
  Synthetic construct
QSVLTQPASVSGSPGQSITISCTGTSSDVGGYNYVSWYQQHPGKAPKLMIYDVNNRPSEVSNRFSGSKSGNTASLTISGLQAEDEADYYCSSYTTGSRAVFGGGTKLTVLGGGGGSGGGGSGGGGSEVQLVQSGAEVKKPGESLTISCKASGYSFPNYWITWVRQMSGGGLEWMGRIDPGDSYTTYNPSFQGHVTISIDKSTNTAYLHWNSLKASDTAMYYCARYYVSLVDIWGQGTLVTVSSTTTPAPRPPTPAPTIASQPLSLRPEACRPAAGGAVHTRGLDFACDIYIWAPLAGTCGVLLLSLVITLYCKRGRKKLLYIFKQPFMRPVQTTQEEDGCSCRFPEEEEGGCELRVKFSRSADAPAYQQGQNQLYNELNLGRREEYDVLDKRRGRDPEMGGKPRRKNPQEGLYNELQKDKMAEAYSEIGMKGERRRGKGHDGLYQGLSTATKDTYDALHMQALPPR

SEQ ID NO: 64 - protein, 465 aa, Artificial Sequence
  Synthetic construct
QSVLTQPASVSGSPGQSITISCTGTSSDVGGYNYVSWYQQHPGKAPKLMIYDVNNRPSEVSNRFSGSKSGNTASLTISGLQAEDEADYYCSSYTTGSRAVFGGGTKLTVLGGGGGSGGGGSGGGGSEVQLVQSGAEVKKPGESLTISCKASGYSFPNYWITWVRQMSGGGLEWMGRIDPGDSYTTYNPSFQGHVTISIDKSTNTAYLHWNSLKASDTAMYYCARYYVSLVDIWGQGTLVTVSSAAAIEVMYPPPYLDNEKSNGTIIHVKGKHLCPSPLFPGPSKPFWVLVVVGGVLACYSLLVTVAFIIFWVRSKRSRLLHSDYMNMTPRRPGPTRKHYQPYAPPRDFAAYRSRVKFSRSADAPAYQQGQNQLYNELNLGRREEYDVLDKRRGRDPEMGGKPRRKNPQEGLYNELQKDKMAEAYSEIGMKGERRRGKGHDGLYQGLSTATKDTYDALHMQALPPR

SEQ ID NO: 65 - protein, 254 aa, Artificial Sequence
  Synthetic construct
QSVLTQPPSVSGAPGQRVTISCTGSSSNIGAGYDVHWYQQLPGTAPKLLIFGNSNRPSGVPDRFSGFKSGTSASLAITGLQAEDEADYFCQSYDSSLSGSGVFGTGTKVTVLGGGGGSGGGGSGGGGSQMQLVQSGGGLVQPGRSLRLSCAASGFTFDDYAMHWVRQAPGKGLEWVSGISWNSGSIGYADSVKGRFTISRDNAKNSLYLQMNSLRAEDTALYYCAKDIHSGSYYGLLYYAMDVWGQGTTVTVSS

SEQ ID NO: 66 - protein, 477 aa, Artificial Sequence
  Synthetic construct
QSVLTQPPSVSGAPGQRVTISCTGSSSNIGAGYDVHWYQQLPGTAPKLLIFGNSNRPSGVPDRFSGFKSGTSASLAITGLQAEDEADYFCQSYDSSLSGSGVFGTGTKVTVLGGGGGSGGGGSGGGGSQMQLVQSGGGLVQPGRSLRLSCAASGFTFDDYAMHWVRQAPGKGLEWVSGISWNSGSIGYADSVKGRFTISRDNAKNSLYLQMNSLRAEDTALYYCAKDIHSGSYYGLLYYAMDVWGQGTTVTVSSTTTPAPRPPTPAPTIASQPLSLRPEACRPAAGGAVHTRGLDFACDIYIWAPLAGTCGVLLLSLVITLYCKRGRKKLLYIFKQPFMRPVQTTQEEDGCSCRFPEEEEGGCELRVKFSRSADAPAYQQGQNQLYNELNLGRREEYDVLDKRRGRDPEMGGKPRRKNPQEGLYNELQKDKMAEAYSEIGMKGERRRGKGHDGLYQGLSTATKDTYDALHMQALPPR

SEQ ID NO: 67 - protein, 476 aa, Artificial Sequence
  Synthetic construct
QSVLTQPPSVSGAPGQRVTISCTGSSSNIGAGYDVHWYQQLPGTAPKLLIFGNSNRPSGVPDRFSGFKSGTSASLAITGLQAEDEADYFCQSYDSSLSGSGVFGTGTKVTVLGGGGGSGGGGSGGGGSQMQLVQSGGGLVQPGRSLRLSCAASGFTFDDYAMHWVRQAPGKGLEWVSGISWNSGSIGYADSVKGRFTISRDNAKNSLYLQMNSLRAEDTALYYCAKDIHSGSYYGLLYYAMDVWGQGTTVTVSSAAAIEVMYPPPYLDNEKSNGTIIHVKGKHLCPSPLFPGPSKPFWVLVVVGGVLACYSLLVTVAFIIFWVRSKRSRLLHSDYMNMTPRRPGPTRKHYQPYAPPRDFAAYRSRVKFSRSADAPAYQQGQNQLYNELNLGRREEYDVLDKRRGRDPEMGGKPRRKNPQEGLYNELQKDKMAEAYSEIGMKGERRRGKGHDGLYQGLSTATKDTYDALHMQALPPR

SEQ ID NO: 68 - protein, 242 aa, Artificial Sequence
  Synthetic construct
AEVQLLESGGGLVQPGGSLRLSCAASGFTFSLYHMSWVRQAPGKGLEWVSAINGSGGSTYYADSVKGRFTISRDNSKNTLYLQMNSLRAEDTAVYYCAKTPWLPKFDYWGQGTLVTVSSGGGGSGGGGSGGGGSSELTQDPAVSVALGQTVRITCQGDSLRWKRASWYQQKPGQAPVLVIYGKNNRPSGIPDRFSGSSSGNTASLTITGAQAEDEADYYCNSSNPTTLRVVFGGGTKLTVLG

SEQ ID NO: 69 - protein, 465 aa, Artificial Sequence
  Synthetic construct
AEVQLLESGGGLVQPGGSLRLSCAASGFTFSLYHMSWVRQAPGKGLEWVSAINGSGGSTYYADSVKGRFTISRDNSKNTLYLQMNSLRAEDTAVYYCAKTPWLPKFDYWGQGTLVTVSSGGGGSGGGGSGGGGSSELTQDPAVSVALGQTVRITCQGDSLRWKRASWYQQKPGQAPVLVIYGKNNRPSGIPDRFSGSSSGNTASLTITGAQAEDEADYYCNSSNPTTLRVVFGGGTKLTVLGTTTPAPRPPTPAPTIASQPLSLRPEACRPAAGGAVHTRGLDFACDIYIWAPLAGTCGVLLLSLVITLYCKRGRKKLLYIFKQPFMRPVQTTQEEDGCSCRFPEEEEGGCELRVKFSRSADAPAYQQGQNQLYNELNLGRREEYDVLDKRRGRDPEMGGKPRRKNPQEGLYNELQKDKMAEAYSEIGMKGERRRGKGHDGLYQGLSTATKDTYDALHMQALPPR

SEQ ID NO: 70 - protein, 464 aa, Artificial Sequence
  Synthetic construct
AEVQLLESGGGLVQPGGSLRLSCAASGFTFSLYHMSWVRQAPGKGLEWVSAINGSGGSTYYADSVKGRFTISRDNSKNTLYLQMNSLRAEDTAVYYCAKTPWLPKFDYWGQGTLVTVSSGGGGSGGGGSGGGGSSELTQDPAVSVALGQTVRITCQGDSLRWKRASWYQQKPGQAPVLVIYGKNNRPSGIPDRFSGSSSGNTASLTITGAQAEDEADYYCNSSNPTTLRVVFGGGTKLTVLGAAAIEVMYPPPYLDNEKSNGTIIHVKGKHLCPSPLFPGPSKPFWVLVVVGGVLACYSLLVTVAFIIFWVRSKRSRLLHSDYMNMTPRRPGPTRKHYQPYAPPRDFAAYRSRVKFSRSADAPAYQQGQNQLYNELNLGRREEYDVLDKRRGRDPEMGGKPRRKNPQEGLYNELQKDKMAEAYSEIGMKGERRRGKGHDGLYQGLSTATKDTYDALHMQALPPR

SEQ ID NO: 71 - protein, 243 aa, Artificial Sequence
  Synthetic construct
DIQMTQSPSSLSASVGDRVTITCRASENIYSYVAWYQQKPGKAPKLLIYNAKSLASGVPSRFSGSGSGTDFTLTISSLQPEDFATYYCQHHYVSPWTFGGGTKLEIKGGGGSGGGGSGGGGSQVQLQESGPGLVKPSETLSLTCTVSGFSLTSYGVSWIRQPAGKGLEWIGVIWEDGSTNYHSALISRVTMSVDTSKNQFSLKLSSVTAADTAVYYCARPHYGSSYVGAMEYWGAGTTVTVSS

SEQ ID NO: 72 - protein, 466 aa, Artificial Sequence
  Synthetic construct
DIQMTQSPSSLSASVGDRVTITCRASENIYSYVAWYQQKPGKAPKLLIYNAKSLASGVPSRFSGSGSGTDFTLTISSLQPEDFATYYCQHHYVSPWTFGGGTKLEIKGGGGSGGGGSGGGGSQVQLQESGPGLVKPSETLSLTCTVSGFSLTSYGVSWIRQPAGKGLEWIGVIWEDGSTNYHSALISRVTMSVDTSKNQFSLKLSSVTAADTAVYYCARPHYGSSYVGAMEYWGAGTTVTVSSTTTPAPRPPTPAPTIASQPLSLRPEACRPAAGGAVHTRGLDFACDIYIWAPLAGTCGVLLLSLVITLYCKRGRKKLLYIFKQPFMRPVQTTQEEDGCSCRFPEEEEGGCELRVKFSRSADAPAYQQGQNQLYNELNLGRREEYDVLDKRRGRDPEMGGKPRRKNPQEGLYNELQKDKMAEAYSEIGMKGERRRGKGHDGLYQGLSTATKDTYDALHMQALPPR

SEQ ID NO: 73 - protein, 465 aa, Artificial Sequence
  Synthetic construct
DIQMTQSPSSLSASVGDRVTITCRASENIYSYVAWYQQKPGKAPKLLIYNAKSLASGVPSRFSGSGSGTDFTLTISSLQPEDFATYYCQHHYVSPWTFGGGTKLEIKGGGGSGGGGSGGGGSQVQLQESGPGLVKPSETLSLTCTVSGFSLTSYGVSWIRQPAGKGLEWIGVIWEDGSTNYHSALISRVTMSVDTSKNQFSLKLSSVTAADTAVYYCARPHYGSSYVGAMEYWGAGTTVTVSSAAAIEVMYPPPYLDNEKSNGTIIHVKGKHLCPSPLFPGPSKPFWVLVVVGGVLACYSLLVTVAFIIFWVRSKRSRLLHSDYMNMTPRRPGPTRKHYQPYAPPRDFAAYRSRVKFSRSADAPAYQQGQNQLYNELNLGRREEYDVLDKRRGRDPEMGGKPRRKNPQEGLYNELQKDKMAEAYSEIGMKGERRRGKGHDGLYQGLSTATKDTYDALHMQALPPR

SEQ ID NO: 74 - protein, 243 aa, Artificial Sequence
  Synthetic construct
DIQLTQSPASLSASVGETVTITCRASGNIHNYLAWYQQKPGKSPQLLVYNAKTLADGVPSRFSGSGSGTDYSLKINSLQPEDFGTYYCQQFWRTPWTFGGGTKLEIKGGGGSGGGGSGGGGSEVQLQQSGAELVRPGASVKLSCKASGYTFTDHWMHWVKQRPGQGLEWIGNFYPGSGFATYDDQFKSKATLTVDTSSSTAYLQLSSLTSEDSAVYYCAREYYGGSFSPLGTWGQGTTVTVSS

SEQ ID NO: 75 - protein, 466 aa, Artificial Sequence
  Synthetic construct
DIQLTQSPASLSASVGETVTITCRASGNIHNYLAWYQQKPGKSPQLLVYNAKTLADGVPSRFSGSGSGTDYSLKINSLQPEDFGTYYCQQFWRTPWTFGGGTKLEIKGGGGSGGGGSGGGGSEVQLQQSGAELVRPGASVKLSCKASGYTFTDHWMHWVKQRPGQGLEWIGNFYPGSGFATYDDQFKSKATLTVDTSSSTAYLQLSSLTSEDSAVYYCAREYYGGSFSPLGTWGQGTTVTVSSTTTPAPRPPTPAPTIASQPLSLRPEACRPAAGGAVHTRGLDFACDIYIWAPLAGTCGVLLLSLVITLYCKRGRKKLLYIFKQPFMRPVQTTQEEDGCSCRFPEEEEGGCELRVKFSRSADAPAYQQGQNQLYNELNLGRREEYDVLDKRRGRDPEMGGKPRRKNPQEGLYNELQKDKMAEAYSEIGMKGERRRGKGHDGLYQGLSTATKDTYDALHMQALPPR

SEQ ID NO: 76 - protein, 465 aa, Artificial Sequence
  Synthetic construct
DIQLTQSPASLSASVGETVTITCRASGNIHNYLAWYQQKPGKSPQLLVYNAKTLADGVPSRFSGSGSGTDYSLKINSLQPEDFGTYYCQQFWRTPWTFGGGTKLEIKGGGGSGGGGSGGGGSEVQLQQSGAELVRPGASVKLSCKASGYTFTDHWMHWVKQRPGQGLEWIGNFYPGSGFATYDDQFKSKATLTVDTSSSTAYLQLSSLTSEDSAVYYCAREYYGGSFSPLGTWGQGTTVTVSSAAAIEVMYPPPYLDNEKSNGTIIHVKGKHLCPSPLFPGPSKPFWVLVVVGGVLACYSLLVTVAFIIFWVRSKRSRLLHSDYMNMTPRRPGPTRKHYQPYAPPRDFAAYRSRVKFSRSADAPAYQQGQNQLYNELNLGRREEYDVLDKRRGRDPEMGGKPRRKNPQEGLYNELQKDKMAEAYSEIGMKGERRRGKGHDGLYQGLSTATKDTYDALHMQALPPR

SEQ ID NO: 77 - protein, 247 aa, Artificial Sequence
  Synthetic construct
QVQLQQSGGGLVKPGGSLRLSCAASGFTFSSYDMHWVRQAPGKGLEWVAVISYDGSNKYYADSVKGRFTISRDNSKNTLYLQMDSLRAEDTAVYFCAKEGDSSRWSYDLWGRGTLVTVSSGGGGSGGGGSGGGGSQSALTQPASVSGSPGQSITISCTGTSSDVGGYNYVSWYQQHPGKAPKVMIYDVTNRPSGVSNRFSGSKSGNTASLTISGLQAEDEADYYCSSYTSTSTFVVFGGGTKLTVLG

SEQ ID NO: 78 - protein, 470 aa, Artificial Sequence
  Synthetic construct
QVQLQQSGGGLVKPGGSLRLSCAASGFTFSSYDMHWVRQAPGKGLEWVAVISYDGSNKYYADSVKGRFTISRDNSKNTLYLQMDSLRAEDTAVYFCAKEGDSSRWSYDLWGRGTLVTVSSGGGGSGGGGSGGGGSQSALTQPASVSGSPGQSITISCTGTSSDVGGYNYVSWYQQHPGKAPKVMIYDVTNRPSGVSNRFSGSKSGNTASLTISGLQAEDEADYYCSSYTSTSTFVVFGGGTKLTVLGTTTPAPRPPTPAPTIASQPLSLRPEACRPAAGGAVHTRGLDFACDIYIWAPLAGTCGVLLLSLVITLYCKRGRKKLLYIFKQPFMRPVQTTQEEDGCSCRFPEEEEGGCELRVKFSRSADAPAYQQGQNQLYNELNLGRREEYDVLDKRRGRDPEMGGKPRRKNPQEGLYNELQKDKMAEAYSEIGMKGERRRGKGHDGLYQGLSTATKDTYDALHMQALPPR

SEQ ID NO: 79 - protein, 469 aa, Artificial Sequence
  Synthetic construct
QVQLQQSGGGLVKPGGSLRLSCAASGFTFSSYDMHWVRQAPGKGLEWVAVISYDGSNKYYADSVKGRFTISRDNSKNTLYLQMDSLRAEDTAVYFCAKEGDSSRWSYDLWGRGTLVTVSSGGGGSGGGGSGGGGSQSALTQPASVSGSPGQSITISCTGTSSDVGGYNYVSWYQQHPGKAPKVMIYDVTNRPSGVSNRFSGSKSGNTASLTISGLQAEDEADYYCSSYTSTSTFVVFGGGTKLTVLGAAAIEVMYPPPYLDNEKSNGTIIHVKGKHLCPSPLFPGPSKPFWVLVVVGGVLACYSLLVTVAFIIFWVRSKRSRLLHSDYMNMTPRRPGPTRKHYQPYAPPRDFAAYRSRVKFSRSADAPAYQQGQNQLYNELNLGRREEYDVLDKRRGRDPEMGGKPRRKNPQEGLYNELQKDKMAEAYSEIGMKGERRRGKGHDGLYQGLSTATKDTYDALHMQALPPR

SEQ ID NO: 80 - protein, 246 aa, Artificial Sequence
  Synthetic construct
QVQLQQSGGGLVKPGGSLRLSCAASGFTFSSYAMHWVRQAPGKGLEWVAVISYDGSNKYYADSVKGRFTISRDNSKNTLYLQMDSLRAEDTAVYYCAKEGDSSRWSYDLWGRGTLVTVSSGGGGSGGGGSGGGGSQSALTQPASVSGSPGQSITISCTGTSSDVGGYNYVSWYQQHPGKAPKVMIYDVTNRPSGVSNRFSGSKSGNTASLTISGLQAEDEADYYCSSYTIASTLVVFGGGTKLTVL

SEQ ID NO: 81 - protein, 469 aa, Artificial Sequence
  Synthetic construct
QVQLQQSGGGLVKPGGSLRLSCAASGFTFSSYAMHWVRQAPGKGLEWVAVISYDGSNKYYADSVKGRFTISRDNSKNTLYLQMDSLRAEDTAVYYCAKEGDSSRWSYDLWGRGTLVTVSSGGGGSGGGGSGGGGSQSALTQPASVSGSPGQSITISCTGTSSDVGGYNYVSWYQQHPGKAPKVMIYDVTNRPSGVSNRFSGSKSGNTASLTISGLQAEDEADYYCSSYTIASTLVVFGGGTKLTVLTTTPAPRPPTPAPTIASQPLSLRPEACRPAAGGAVHTRGLDFACDIYIWAPLAGTCGVLLLSLVITLYCKRGRKKLLYIFKQPFMRPVQTTQEEDGCSCRFPEEEEGGCELRVKFSRSADAPAYQQGQNQLYNELNLGRREEYDVLDKRRGRDPEMGGKPRRKNPQEGLYNELQKDKMAEAYSEIGMKGERRRGKGHDGLYQGLSTATKDTYDALHMQALPPR

SEQ ID NO: 82 - protein, 468 aa, Artificial Sequence
  Synthetic construct
QVQLQQSGGGLVKPGGSLRLSCAASGFTFSSYAMHWVRQAPGKGLEWVAVISYDGSNKYYADSVKGRFTISRDNSKNTLYLQMDSLRAEDTAVYYCAKEGDSSRWSYDLWGRGTLVTVSSGGGGSGGGGSGGGGSQSALTQPASVSGSPGQSITISCTGTSSDVGGYNYVSWYQQHPGKAPKVMIYDVTNRPSGVSNRFSGSKSGNTASLTISGLQAEDEADYYCSSYTIASTLVVFGGGTKLTVLAAAIEVMYPPPYLDNEKSNGTIIHVKGKHLCPSPLFPGPSKPFWVLVVVGGVLACYSLLVTVAFIIFWVRSKRSRLLHSDYMNMTPRRPGPTRKHYQPYAPPRDFAAYRSRVKFSRSADAPAYQQGQNQLYNELNLGRREEYDVLDKRRGRDPEMGGKPRRKNPQEGLYNELQKDKMAEAYSEIGMKGERRRGKGHDGLYQGLSTATKDTYDALHMQALPPR

SEQ ID NO: 83 - protein, 469 aa, Artificial Sequence
  Synthetic construct
QSALTQPASVSGSPGQSITISCTGTSSDVGGYNYVSWYQQHPGKAPKVMIYDVTNRPSGVSNRFSGSKSGNTASLTISGLQAEDEADYYCSSYTSTSTFVVFGGGTKLTVLGGGGSGGGGSGGGGSQVQLQQSGGGLVKPGGSLRLSCAASGFTFSSYDMHWVRQAPGKGLEWVAVISYDGSNKYYADSVKGRFTISRDNSKNTLYLQMDSLRAEDTAVYFCAKEGDSSRWSYDLWGRGTLVTVSSTTTPAPRPPTPAPTIASQPLSLRPEACRPAAGGAVHTRGLDFACDIYIWAPLAGTCGVLLLSLVITLYCKRGRKKLLYIFKQPFMRPVQTTQEEDGCSCRFPEEEEGGCELRVKFSRSADAPAYQQGQNQLYNELNLGRREEYDVLDKRRGRDPEMGGKPRRKNPQEGLYNELQKDKMAEAYSEIGMKGERRRGKGHDGLYQGLSTATKDTYDALHMQALPPR

SEQ ID NO: 84 - protein, 468 aa, Artificial Sequence
  Synthetic construct
QSALTQPASVSGSPGQSITISCTGTSSDVGGYNYVSWYQQHPGKAPKVMIYDVTNRPSGVSNRFSGSKSGNTASLTISGLQAEDEADYYCSSYTSTSTFVVFGGGTKLTVLGGGGSGGGGSGGGGSQVQLQQSGGGLVKPGGSLRLSCAASGFTFSSYDMHWVRQAPGKGLEWVAVISYDGSNKYYADSVKGRFTISRDNSKNTLYLQMDSLRAEDTAVYFCAKEGDSSRWSYDLWGRGTLVTVSSAAAIEVMYPPPYLDNEKSNGTIIHVKGKHLCPSPLFPGPSKPFWVLVVVGGVLACYSLLVTVAFIIFWVRSKRSRLLHSDYMNMTPRRPGPTRKHYQPYAPPRDFAAYRSRVKFSRSADAPAYQQGQNQLYNELNLGRREEYDVLDKRRGRDPEMGGKPRRKNPQEGLYNELQKDKMAEAYSEIGMKGERRRGKGHDGLYQGLSTATKDTYDALHMQALPPR

SEQ ID NO: 85 - protein, 250 aa, Artificial Sequence
  Synthetic construct
QVTLKESGPVLVKPTETLTLTCTVSGFSLSNARMGVTWIRQPPGKALEWLAHIFSNDEKSYSTSLKSRLTISKDTSKTQVVLTMTNMDPVDTATYYCARIRDYYDISSYYDYWGQGTLVSVSSGGGGSGGGGSGGGGSGGGGSDIQMTQSPSAMSASVGDRVTITCRASQDISNYLAWFQQKPGKVPKRLIYAASSLQSGVPSRFSGSGSGTEFTLTISSLLPEDFATYYCLQLNSFPFTFGGGTKVEIN

SEQ ID NO: 86 - protein, 473 aa, Artificial Sequence
  Synthetic construct
QVTLKESGPVLVKPTETLTLTCTVSGFSLSNARMGVTWIRQPPGKALEWLAHIFSNDEKSYSTSLKSRLTISKDTSKTQVVLTMTNMDPVDTATYYCARIRDYYDISSYYDYWGQGTLVSVSSGGGGSGGGGSGGGGSGGGGSDIQMTQSPSAMSASVGDRVTITCRASQDISNYLAWFQQKPGKVPKRLIYAASSLQSGVPSRFSGSGSGTEFTLTISSLLPEDFATYYCLQLNSFPFTFGGGTKVEINTTTPAPRPPTPAPTIASQPLSLRPEACRPAAGGAVHTRGLDFACDIYIWAPLAGTCGVLLLSLVITLYCKRGRKKLLYIFKQPFMRPVQTTQEEDGCSCRFPEEEEGGCELRVKFSRSADAPAYQQGQNQLYNELNLGRREEYDVLDKRRGRDPEMGGKPRRKNPQEGLYNELQKDKMAEAYSEIGMKGERRRGKGHDGLYQGLSTATKDTYDALHMQALPPR

SEQ ID NO: 87 - protein, 472 aa, Artificial Sequence
  Synthetic construct
QVTLKESGPVLVKPTETLTLTCTVSGFSLSNARMGVTWIRQPPGKALEWLAHIFSNDEKSYSTSLKSRLTISKDTSKTQVVLTMTNMDPVDTATYYCARIRDYYDISSYYDYWGQGTLVSVSSGGGGSGGGGSGGGGSGGGGSDIQMTQSPSAMSASVGDRVTITCRASQDISNYLAWFQQKPGKVPKRLIYAASSLQSGVPSRFSGSGSGTEFTLTISSLLPEDFATYYCLQLNSFPFTFGGGTKVEINAAAIEVMYPPPYLDNEKSNGTIIHVKGKHLCPSPLFPGPSKPFWVLVVVGGVLACYSLLVTVAFIIFWVRSKRSRLLHSDYMNMTPRRPGPTRKHYQPYAPPRDFAAYRSRVKFSRSADAPAYQQGQNQLYNELNLGRREEYDVLDKRRGRDPEMGGKPRRKNPQEGLYNELQKDKMAEAYSEIGMKGERRRGKGHDGLYQGLSTATKDTYDALHMQALPPR

SEQ ID NO: 88 - protein, 246 aa, Artificial Sequence
  Synthetic construct
QEQLVESGGGVVQPGRSLRLSCAASGFTFSSYGMHWVRQAPGKGLEWVAVTWYDGSNKYYGDSVKGRFTISRDNSKNTLYLQMNSLRAEDTAVYYCARDLLRGVKGYAMDVWGQGTTVTVSSGGGGSGGGGSGGGGSEIVLTQSPGTLSLSPGERATLSCRASQSLRRIYLAWYQQKPGQAPRLLIYDVFDRATGIPDRFSGGGSGTDFTLTISRLEPEDFAVYYCQQYSDSPFTFGPGTKVDIKR

SEQ ID NO: 89 - protein, 469 aa, Artificial Sequence
  Synthetic construct
QEQLVESGGGVVQPGRSLRLSCAASGFTFSSYGMHWVRQAPGKGLEWVAVTWYDGSNKYYGDSVKGRFTISRDNSKNTLYLQMNSLRAEDTAVYYCARDLLRGVKGYAMDVWGQGTTVTVSSGGGGSGGGGSGGGGSEIVLTQSPGTLSLSPGERATLSCRASQSLRRIYLAWYQQKPGQAPRLLIYDVFDRATGIPDRFSGGGSGTDFTLTISRLEPEDFAVYYCQQYSDSPFTFGPGTKVDIKRTTTPAPRPPTPAPTIASQPLSLRPEACRPAAGGAVHTRGLDFACDIYIWAPLAGTCGVLLLSLVITLYCKRGRKKLLYIFKQPFMRPVQTTQEEDGCSCRFPEEEEGGCELRVKFSRSADAPAYQQGQNQLYNELNLGRREEYDVLDKRRGRDPEMGGKPRRKNPQEGLYNELQKDKMAEAYSEIGMKGERRRGKGHDGLYQGLSTATKDTYDALHMQALPPR

SEQ ID NO: 90 - protein, 468 aa, Artificial Sequence
  Synthetic construct
QEQLVESGGGVVQPGRSLRLSCAASGFTFSSYGMHWVRQAPGKGLEWVAVTWYDGSNKYYGDSVKGRFTISRDNSKNTLYLQMNSLRAEDTAVYYCARDLLRGVKGYAMDVWGQGTTVTVSSGGGGSGGGGSGGGGSEIVLTQSPGTLSLSPGERATLSCRASQSLRRIYLAWYQQKPGQAPRLLIYDVFDRATGIPDRFSGGGSGTDFTLTISRLEPEDFAVYYCQQYSDSPFTFGPGTKVDIKRAAAIEVMYPPPYLDNEKSNGTIIHVKGKHLCPSPLFPGPSKPFWVLVVVGGVLACYSLLVTVAFIIFWVRSKRSRLLHSDYMNMTPRRPGPTRKHYQPYAPPRDFAAYRSRVKFSRSADAPAYQQGQNQLYNELNLGRREEYDVLDKRRGRDPEMGGKPRRKNPQEGLYNELQKDKMAEAYSEIGMKGERRRGKGHDGLYQGLSTATKDTYDALHMQALPPR

SEQ ID NO: 91 - protein, 248 aa, Artificial Sequence
  Synthetic construct
QAVVTQEPSLTVSPGGTVTLTCGLKSGSVTSDNFPTWYQQTPGQAPALLIYNTNTRHSGVPDRFSGSILGNKAALTITGAQADDEAEYFCALFISNPSVEFGGGTQLTVLGGGGGSGGGGSGGGGSEVQLVESGGGLVQPGGSLRLSCAASGFTFSVYYMNWVRQAPGKGLEWVSDINNEGGTTYYADSVKGRFTISRDNSKNSLYLQMNSLRAEDTAVYYCARDAGYSNHVPIFDSWGQGTLVIVSS

SEQ ID NO: 92 - protein, 471 aa, Artificial Sequence
  Synthetic construct
QAVVTQEPSLTVSPGGTVTLTCGLKSGSVTSDNFPTWYQQTPGQAPALLIYNTNTRHSGVPDRFSGSILGNKAALTITGAQADDEAEYFCALFISNPSVEFGGGTQLTVLGGGGGSGGGGSGGGGSEVQLVESGGGLVQPGGSLRLSCAASGFTFSVYYMNWVRQAPGKGLEWVSDINNEGGTTYYADSVKGRFTISRDNSKNSLYLQMNSLRAEDTAVYYCARDAGYSNHVPIFDSWGQGTLVIVSSTTTPAPRPPTPAPTIASQPLSLRPEACRPAAGGAVHTRGLDFACDIYIWAPLAGTCGVLLLSLVITLYCKRGRKKLLYIFKQPFMRPVQTTQEEDGCSCRFPEEEEGGCELRVKFSRSADAPAYQQGQNQLYNELNLGRREEYDVLDKRRGRDPEMGGKPRRKNPQEGLYNELQKDKMAEAYSEIGMKGERRRGKGHDGLYQGLSTATKDTYDALHMQALPPR

SEQ ID NO: 93 - protein, 470 aa, Artificial Sequence
  Synthetic construct
QAVVTQEPSLTVSPGGTVTLTCGLKSGSVTSDNFPTWYQQTPGQAPALLIYNTNTRHSGVPDRFSGSILGNKAALTITGAQADDEAEYFCALFISNPSVEFGGGTQLTVLGGGGGSGGGGSGGGGSEVQLVESGGGLVQPGGSLRLSCAASGFTFSVYYMNWVRQAPGKGLEWVSDINNEGGTTYYADSVKGRFTISRDNSKNSLYLQMNSLRAEDTAVYYCARDAGYSNHVPIFDSWGQGTLVIVSSAAAIEVMYPPPYLDNEKSNGTIIHVKGKHLCPSPLFPGPSKPFWVLVVVGGVLACYSLLVTVAFIIFWVRSKRSRLLHSDYMNMTPRRPGPTRKHYQPYAPPRDFAAYRSRVKFSRSADAPAYQQGQNQLYNELNLGRREEYDVLDKRRGRDPEMGGKPRRKNPQEGLYNELQKDKMAEAYSEIGMKGERRRGKGHDGLYQGLSTATKDTYDALHMQALPPR

SEQ ID NO: 94 - protein, 247 aa, Artificial Sequence
  Synthetic construct
QVQLQESGGGLVQTGGSLRLSCTASGSIFDIARGNWYRQAPGKQRELVAIITSGGATNYADSVAGRFTISRDDAKNTVYLQMNGLKPEDTAVYFCNMESLSYRHYWGQGTQVTVSSGGGGSGGGGSGGGGSQVQLQESGGGLVQTGGSLRLSCTASGSIFDIARGNWYRQAPGKQRELVAIITSGGATNYADSVAGRFTISRDDAKNTVYLQMNGLKPEDTAVYFCNMESLSYRHYWGQGTQVTVSS

SEQ ID NO: 95 - protein, 470 aa, Artificial Sequence
  Synthetic construct
QVQLQESGGGLVQTGGSLRLSCTASGSIFDIARGNWYRQAPGKQRELVAIITSGGATNYADSVAGRFTISRDDAKNTVYLQMNGLKPEDTAVYFCNMESLSYRHYWGQGTQVTVSSGGGGSGGGGSGGGGSQVQLQESGGGLVQTGGSLRLSCTASGSIFDIARGNWYRQAPGKQRELVAIITSGGATNYADSVAGRFTISRDDAKNTVYLQMNGLKPEDTAVYFCNMESLSYRHYWGQGTQVTVSSTTTPAPRPPTPAPTIASQPLSLRPEACRPAAGGAVHTRGLDFACDIYIWAPLAGTCGVLLLSLVITLYCKRGRKKLLYIFKQPFMRPVQTTQEEDGCSCRFPEEEEGGCELRVKFSRSADAPAYQQGQNQLYNELNLGRREEYDVLDKRRGRDPEMGGKPRRKNPQEGLYNELQKDKMAEAYSEIGMKGERRRGKGHDGLYQGLSTATKDTYDALHMQALPPR

SEQ ID NO: 96 - protein, 469 aa, Artificial Sequence
  Synthetic construct
QVQLQESGGGLVQTGGSLRLSCTASGSIFDIARGNWYRQAPGKQRELVAIITSGGATNYADSVAGRFTISRDDAKNTVYLQMNGLKPEDTAVYFCNMESLSYRHYWGQGTQVTVSSGGGGSGGGGSGGGGSQVQLQESGGGLVQTGGSLRLSCTASGSIFDIARGNWYRQAPGKQRELVAIITSGGATNYADSVAGRFTISRDDAKNTVYLQMNGLKPEDTAVYFCNMESLSYRHYWGQGTQVTVSSAAAIEVMYPPPYLDNEKSNGTIIHVKGKHLCPSPLFPGPSKPFWVLVVVGGVLACYSLLVTVAFIIFWVRSKRSRLLHSDYMNMTPRRPGPTRKHYQPYAPPRDFAAYRSRVKFSRSADAPAYQQGQNQLYNELNLGRREEYDVLDKRRGRDPEMGGKPRRKNPQEGLYNELQKDKMAEAYSEIGMKGERRRGKGHDGLYQGLSTATKDTYDALHMQALPPR

SEQ ID NO: 97 - protein, 267 aa, Artificial Sequence
  Synthetic construct
QVQLQESGGGLVQPGGSLRLSCVASGFTLDRYAVGWFRQAPGKELEGVSCISSSGDIIKYADSAKGRFTIARDNAKNTAYLQMNSLKPEDTAVYYCTAADPKDDCSVPGYYGLNYWGKGTQVTVSSGGGGSGGGGSGGGGSQVQLQESGGGLVQPGGSLRLSCVASGFTLDRYAVGWFRQAPGKELEGVSCISSSGDIIKYADSAKGRFTIARDNAKNTAYLQMNSLKPEDTAVYYCTAADPKDDCSVPGYYGLNYWGKGTQVTVSS

SEQ ID NO: 98 - protein, 490 aa, Artificial Sequence
  Synthetic construct
QVQLQESGGGLVQPGGSLRLSCVASGFTLDRYAVGWFRQAPGKELEGVSCISSSGDIIKYADSAKGRFTIARDNAKNTAYLQMNSLKPEDTAVYYCTAADPKDDCSVPGYYGLNYWGKGTQVTVSSGGGGSGGGGSGGGGSQVQLQESGGGLVQPGGSLRLSCVASGFTLDRYAVGWFRQAPGKELEGVSCISSSGDIIKYADSAKGRFTIARDNAKNTAYLQMNSLKPEDTAVYYCTAADPKDDCSVPGYYGLNYWGKGTQVTVSSTTTPAPRPPTPAPTIASQPLSLRPEACRPAAGGAVHTRGLDFACDIYIWAPLAGTCGVLLLSLVITLYCKRGRKKLLYIFKQPFMRPVQTTQEEDGCSCRFPEEEEGGCELRVKFSRSADAPAYQQGQNQLYNELNLGRREEYDVLDKRRGRDPEMGGKPRRKNPQEGLYNELQKDKMAEAYSEIGMKGERRRGKGHDGLYQGLSTATKDTYDALHMQALPPR

SEQ ID NO: 99 - protein, 489 aa, Artificial Sequence
  Synthetic construct
QVQLQESGGGLVQPGGSLRLSCVASGFTLDRYAVGWFRQAPGKELEGVSCISSSGDIIKYADSAKGRFTIARDNAKNTAYLQMNSLKPEDTAVYYCTAADPKDDCSVPGYYGLNYWGKGTQVTVSSGGGGSGGGGSGGGGSQVQLQESGGGLVQPGGSLRLSCVASGFTLDRYAVGWFRQAPGKELEGVSCISSSGDIIKYADSAKGRFTIARDNAKNTAYLQMNSLKPEDTAVYYCTAADPKDDCSVPGYYGLNYWGKGTQVTVSSAAAIEVMYPPPYLDNEKSNGTIIHVKGKHLCPSPLFPGPSKPFWVLVVVGGVLACYSLLVTVAFIIFWVRSKRSRLLHSDYMNMTPRRPGPTRKHYQPYAPPRDFAAYRSRVKFSRSADAPAYQQGQNQLYNELNLGRREEYDVLDKRRGRDPEMGGKPRRKNPQEGLYNELQKDKMAEAYSEIGMKGERRRGKGHDGLYQGLSTATKDTYDALHMQALPPR

SEQ ID NO: 100 - protein, 255 aa, Artificial Sequence
  Synthetic construct
EVQLVQSGAEVKKPGESLKISCKGSGYGFTSYWIGWVRQMPGKGLEWMGIIHPDDSDTKYSPSFQGQVTISADKSISTAYLQWSSLKASDTAMYYCASSYLRGLWGGYFDYWGQGTLVTVSSGGGGSGGGGSGGGGSGGGGSELQSVLTQPPSASGTPGQRVTISCSGSSSNIGSNYVNWYQQLPGTAPKLLIYGDYQRPSGVPDRFSGSKSGTSASLAISGLRSEDEADYYCATRDDSLSGSVVFGTGTKLTVL

SEQ ID NO: 101 - protein, 478 aa, Artificial Sequence
  Synthetic construct
EVQLVQSGAEVKKPGESLKISCKGSGYGFTSYWIGWVRQMPGKGLEWMGIIHPDDSDTKYSPSFQGQVTISADKSISTAYLQWSSLKASDTAMYYCASSYLRGLWGGYFDYWGQGTLVTVSSGGGGSGGGGSGGGGSGGGGSELQSVLTQPPSASGTPGQRVTISCSGSSSNIGSNYVNWYQQLPGTAPKLLIYGDYQRPSGVPDRFSGSKSGTSASLAISGLRSEDEADYYCATRDDSLSGSVVFGTGTKLTVLTTTPAPRPPTPAPTIASQPLSLRPEACRPAAGGAVHTRGLDFACDIYIWAPLAGTCGVLLLSLVITLYCKRGRKKLLYIFKQPFMRPVQTTQEEDGCSCRFPEEEEGGCELRVKFSRSADAPAYQQGQNQLYNELNLGRREEYDVLDKRRGRDPEMGGKPRRKNPQEGLYNELQKDKMAEAYSEIGMKGERRRGKGHDGLYQGLSTATKDTYDALHMQALPPR

SEQ ID NO: 102 - protein, 477 aa, Artificial Sequence
  Synthetic construct
EVQLVQSGAEVKKPGESLKISCKGSGYGFTSYWIGWVRQMPGKGLEWMGIIHPDDSDTKYSPSFQGQVTISADKSISTAYLQWSSLKASDTAMYYCASSYLRGLWGGYFDYWGQGTLVTVSSGGGGSGGGGSGGGGSGGGGSELQSVLTQPPSASGTPGQRVTISCSGSSSNIGSNYVNWYQQLPGTAPKLLIYGDYQRPSGVPDRFSGSKSGTSASLAISGLRSEDEADYYCATRDDSLSGSVVFGTGTKLTVLAAAIEVMYPPPYLDNEKSNGTIIHVKGKHLCPSPLFPGPSKPFWVLVVVGGVLACYSLLVTVAFIIFWVRSKRSRLLHSDYMNMTPRRPGPTRKHYQPYAPPRDFAAYRSRVKFSRSADAPAYQQGQNQLYNELNLGRREEYDVLDKRRGRDPEMGGKPRRKNPQEGLYNELQKDKMAEAYSEIGMKGERRRGKGHDGLYQGLSTATKDTYDALHMQALPPR

SEQ ID NO: 103 - protein, 245 aa, Artificial Sequence
  Synthetic construct
DIVMTQSPDSLAVSLGERATINCRASKSVSTSGYSFMHWYQQKPGQPPKLLIYLASNLESGVPDRFSGSGSGTDFTLTISSLQAEDVAVYYCQHSREVPWTFGQGTKVEIKGGGGSGGGGSGGGGSGQVQLVQSGAEVKKPGASVKVSCKASGYTFTNYGMNWVRQAPGQGLKWMGWINTYTGEPTYADAFKGRVTMTRDTSISTAYMELSRLRSDDTAVYYCARDYGDYGMDYWGQGTTVTVSS

SEQ ID NO: 104 - protein, 468 aa, Artificial Sequence
  Synthetic construct
DIVMTQSPDSLAVSLGERATINCRASKSVSTSGYSFMHWYQQKPGQPPKLLIYLASNLESGVPDRFSGSGSGTDFTLTISSLQAEDVAVYYCQHSREVPWTFGQGTKVEIKGGGGSGGGGSGGGGSGQVQLVQSGAEVKKPGASVKVSCKASGYTFTNYGMNWVRQAPGQGLKWMGWINTYTGEPTYADAFKGRVTMTRDTSISTAYMELSRLRSDDTAVYYCARDYGDYGMDYWGQGTTVTVSSTTTPAPRPPTPAPTIASQPLSLRPEACRPAAGGAVHTRGLDFACDIYIWAPLAGTCGVLLLSLVITLYCKRGRKKLLYIFKQPFMRPVQTTQEEDGCSCRFPEEEEGGCELRVKFSRSADAPAYQQGQNQLYNELNLGRREEYDVLDKRRGRDPEMGGKPRRKNPQEGLYNELQKDKMAEAYSEIGMKGERRRGKGHDGLYQGLSTATKDTYDALHMQALPPR

SEQ ID NO: 105 - protein, 467 aa, Artificial Sequence
  Synthetic construct
DIVMTQSPDSLAVSLGERATINCRASKSVSTSGYSFMHWYQQKPGQPPKLLIYLASNLESGVPDRFSGSGSGTDFTLTISSLQAEDVAVYYCQHSREVPWTFGQGTKVEIKGGGGSGGGGSGGGGSGQVQLVQSGAEVKKPGASVKVSCKASGYTFTNYGMNWVRQAPGQGLKWMGWINTYTGEPTYADAFKGRVTMTRDTSISTAYMELSRLRSDDTAVYYCARDYGDYGMDYWGQGTTVTVSSAAAIEVMYPPPYLDNEKSNGTIIHVKGKHLCPSPLFPGPSKPFWVLVVVGGVLACYSLLVTVAFIIFWVRSKRSRLLHSDYMNMTPRRPGPTRKHYQPYAPPRDFAAYRSRVKFSRSADAPAYQQGQNQLYNELNLGRREEYDVLDKRRGRDPEMGGKPRRKNPQEGLYNELQKDKMAEAYSEIGMKGERRRGKGHDGLYQGLSTATKDTYDALHMQALPPR

SEQ ID NO: 106 - protein, 240 aa, Artificial Sequence
  Synthetic construct
EIVLTQSPATLSLSPGERATLSCRASQSVSSYLAWYQQKPGQAPRLLIYDASNRATGIPARFSGSGSGTDFTLTISSLEPEDFAVYYCQQRTNWPLTFGGGTKVEIKGGGGSGGGGSGGGGSQVQLVESGGGVVQPGRSLRLSCAASGFTFSSYIMHWVRQAPGKGLEWVAVISYDGRNKYYADSVKGRFTISRDNSKNTLYLQMNSLRAEDTAVYYCARDTDGYDFDYWGQGTLVTVSS

SEQ ID NO: 107 - protein, 463 aa, Artificial Sequence
  Synthetic construct
EIVLTQSPATLSLSPGERATLSCRASQSVSSYLAWYQQKPGQAPRLLIYDASNRATGIPARFSGSGSGTDFTLTISSLEPEDFAVYYCQQRTNWPLTFGGGTKVEIKGGGGSGGGGSGGGGSQVQLVESGGGVVQPGRSLRLSCAASGFTFSSYIMHWVRQAPGKGLEWVAVISYDGRNKYYADSVKGRFTISRDNSKNTLYLQMNSLRAEDTAVYYCARDTDGYDFDYWGQGTLVTVSSTTTPAPRPPTPAPTIASQPLSLRPEACRPAAGGAVHTRGLDFACDIYIWAPLAGTCGVLLLSLVITLYCKRGRKKLLYIFKQPFMRPVQTTQEEDGCSCRFPEEEEGGCELRVKFSRSADAPAYQQGQNQLYNELNLGRREEYDVLDKRRGRDPEMGGKPRRKNPQEGLYNELQKDKMAEAYSEIGMKGERRRGKGHDGLYQGLSTATKDTYDALHMQALPPR

SEQ ID NO: 108 - protein, 462 aa, Artificial Sequence
  Synthetic construct
EIVLTQSPATLSLSPGERATLSCRASQSVSSYLAWYQQKPGQAPRLLIYDASNRATGIPARFSGSGSGTDFTLTISSLEPEDFAVYYCQQRTNWPLTFGGGTKVEIKGGGGSGGGGSGGGGSQVQLVESGGGVVQPGRSLRLSCAASGFTFSSYIMHWVRQAPGKGLEWVAVISYDGRNKYYADSVKGRFTISRDNSKNTLYLQMNSLRAEDTAVYYCARDTDGYDFDYWGQGTLVTVSSAAAIEVMYPPPYLDNEKSNGTIIHVKGKHLCPSPLFPGPSKPFWVLVVVGGVLACYSLLVTVAFIIFWVRSKRSRLLHSDYMNMTPRRPGPTRKHYQPYAPPRDFAAYRSRVKFSRSADAPAYQQGQNQLYNELNLGRREEYDVLDKRRGRDPEMGGKPRRKNPQEGLYNELQKDKMAEAYSEIGMKGERRRGKGHDGLYQGLSTATKDTYDALHMQALPPR

SEQ ID NO: 109 - protein, 252 aa, Homo sapiens
EIVLTQSPATLSLSPGERATLSCRASQSVSSYLAWYQQKPGQAPRLLIYDASNRATGIPARFSGSGSGTDFTLTISSLEPEDFAVYYCQQRRNWPLTFGGGTKVEIKGGGGSGGGGSGGGGSQVQLVESGGGVVQPGRSLRLSCAASGFTFSNYGMYWVRQAPGKGLEWVAVIWYDGSNKYYADSVKGRFTISRDNSKNTLYLQMNSLRAEDTAVYYCARDLWGWYFDYWGQGTLVTVSSASTKGPSVFPLA

SEQ ID NO: 110 - protein, 475 aa, Artificial Sequence
  Synthetic construct
EIVLTQSPATLSLSPGERATLSCRASQSVSSYLAWYQQKPGQAPRLLIYDASNRATGIPARFSGSGSGTDFTLTISSLEPEDFAVYYCQQRRNWPLTFGGGTKVEIKGGGGSGGGGSGGGGSQVQLVESGGGVVQPGRSLRLSCAASGFTFSNYGMYWVRQAPGKGLEWVAVIWYDGSNKYYADSVKGRFTISRDNSKNTLYLQMNSLRAEDTAVYYCARDLWGWYFDYWGQGTLVTVSSASTKGPSVFPLATTTPAPRPPTPAPTIASQPLSLRPEACRPAAGGAVHTRGLDFACDIYIWAPLAGTCGVLLLSLVITLYCKRGRKKLLYIFKQPFMRPVQTTQEEDGCSCRFPEEEEGGCELRVKFSRSADAPAYQQGQNQLYNELNLGRREEYDVLDKRRGRDPEMGGKPRRKNPQEGLYNELQKDKMAEAYSEIGMKGERRRGKGHDGLYQGLSTATKDTYDALHMQALPPR

SEQ ID NO: 111 - protein, 474 aa, Artificial Sequence
  Synthetic construct
EIVLTQSPATLSLSPGERATLSCRASQSVSSYLAWYQQKPGQAPRLLIYDASNRATGIPARFSGSGSGTDFTLTISSLEPEDFAVYYCQQRRNWPLTFGGGTKVEIKGGGGSGGGGSGGGGSQVQLVESGGGVVQPGRSLRLSCAASGFTFSNYGMYWVRQAPGKGLEWVAVIWYDGSNKYYADSVKGRFTISRDNSKNTLYLQMNSLRAEDTAVYYCARDLWGWYFDYWGQGTLVTVSSASTKGPSVFPLAAAAIEVMYPPPYLDNEKSNGTIIHVKGKHLCPSPLFPGPSKPFWVLVVVGGVLACYSLLVTVAFIIFWVRSKRSRLLHSDYMNMTPRRPGPTRKHYQPYAPPRDFAAYRSRVKFSRSADAPAYQQGQNQLYNELNLGRREEYDVLDKRRGRDPEMGGKPRRKNPQEGLYNELQKDKMAEAYSEIGMKGERRRGKGHDGLYQGLSTATKDTYDALHMQALPPR

SEQ ID NO: 112 - protein, 241 aa, Homo sapiens; identical to SEQ ID NO: 8

SEQ ID NO: 113 - protein, 464 aa, Artificial Sequence; identical to SEQ ID NO: 9
  Synthetic construct

SEQ ID NO: 114 - protein, 463 aa, Artificial Sequence; identical to SEQ ID NO: 10
  Synthetic construct

SEQ ID NO: 115 - protein, 461 aa, Artificial Sequence
  Synthetic construct
DIVLTQSPSIMSVSPGEKVTITCSASSSVSYMHWFQQKPGTSPKLSIYSTSNLASGVPARFSGRGSGTSYSLTISRVAAEDAATYYCQQRSNYPPWTFGGGTKLEIKGGGGSGGGGSGGGGSEVQLQQSGPELVKPGASMKISCKASGYSFTGYTMNWVKQSHGKNLEWIGLINPYNGGTIYNQKFKGKATLTVDKSSSTAYMELLSLTSEDSAVYYCARDYGFVLDYWGQGTTLTVSSAAAIEVMYPPPYLDNEKSNGTIIHVKGKHLCPSPLFPGPSKPFWVLVVVGGVLACYSLLVTVAFIIFWVRSKRSRLLHSDYMNMTPRRPGPTRKHYQPYAPPRDFAAYRSRVKFSRSADAPAYQQGQNQLYNELNLGRREEYDVLDKRRGRDPEMGGKPRRKNPQEGLYNELQKDKMAEAYSEIGMKGERRRGKGHDGLYQGLSTATKDTYDALHMQALPPR

SEQ ID NO: 116 - protein, 462 aa, Artificial Sequence
  Synthetic construct
QIVLTQSPAIMSASPGEKVTITCSASSSVSYLHWFQQKPGTSPKLWVYSTSNLPSGVPARFGGSGSGTSYSLTISRMEAEDAATYYCQQRSIYPPWTFGGGTKLEIKGGGGSGGGGSGGGGSEVQLQQSGPELVKPGASMKISCKASGYSFTGYTMNWVKQSHGKNLEWIGLINPYNGGTIYNQKFKGKATLTVDKSSSTAYMELLSLTSEDSAVYYCARDYGFVLDYWGQGTTLTVSSTTTPAPRPPTPAPTIASQPLSLRPEACRPAAGGAVHTRGLDFACDIYIWAPLAGTCGVLLLSLVITLYCKRGRKKLLYIFKQPFMRPVQTTQEEDGCSCRFPEEEEGGCELRVKFSRSADAPAYQQGQNQLYNELNLGRREEYDVLDKRRGRDPEMGGKPRRKNPQEGLYNELQKDKMAEAYSEIGMKGERRRGKGHDGLYQGLSTATKDTYDALHMQALPPR

SEQ ID NO: 117 - protein, 461 aa, Artificial Sequence
  Synthetic construct
QIVLTQSPAIMSASPGEKVTITCSASSSVSYLHWFQQKPGTSPKLWVYSTSNLPSGVPARFGGSGSGTSYSLTISRMEAEDAATYYCQQRSIYPPWTFGGGTKLEIKGGGGSGGGGSGGGGSEVQLQQSGPELVKPGASMKISCKASGYSFTGYTMNWVKQSHGKNLEWIGLINPYNGGTIYNQKFKGKATLTVDKSSSTAYMELLSLTSEDSAVYYCARDYGFVLDYWGQGTTLTVSSAAAIEVMYPPPYLDNEKSNGTIIHVKGKHLCPSPLFPGPSKPFWVLVVVGGVLACYSLLVTVAFIIFWVRSKRSRLLHSDYMNMTPRRPGPTRKHYQPYAPPRDFAAYRSRVKFSRSADAPAYQQGQNQLYNELNLGRREEYDVLDKRRGRDPEMGGKPRRKNPQEGLYNELQKDKMAEAYSEIGMKGERRRGKGHDGLYQGLSTATKDTYDALHMQALPPR

SEQ ID NO: 118 - protein, 618 aa, Homo sapiens
MVSPRMSGLLSQTVILALIFLPQTRPAGVFELQIHSFGPGPGPGAPRSPCSARLPCRLFFRVCLKPGLSEEAAESPCALGAALSARGPVYTEQPGAPAPDLPLPDGLLQVPFRDAWPGTFSFIIETWREELGDQIGGPAWSLLARVAGRRRLAAGGPWARDIQRAGAWELRFSYRARCEPPAVGTACTRLCRPRSAPSRCGPGLRPCAPLEDECEAPLVCRAGCSPEHGFCEQPGECRCLEGWTGPLCTVPVSTSSCLSPRGPSSATTGCLVPGPGPCDGNPCANGGSCSETPRSFECTCPRGFYGLRCEVSGVTCADGPCFNGGLCVGGADPDSAYICHCPPGFQGSNCEKRVDRCSLQPCRNGGLCLDLGHALRCRCRAGFAGPRCEHDLDDCAGRACANGGTCVEGGGAHRCSCALGFGGRDCRERADPCAARPCAHGGRCYAHFSGLVCACAPGYMGARCEFPVHPDGASALPAAPPGLRPGDPQRYLLPPALGLLVAAGVAGAALLLVHVRRRGHSQDAGSRLLAGTPEPSVHALPDALNNLRTQEGSGDGPSSSVDWNRPEDVDPQGIYVISAPSIYAREVATPLFPPLHTGRAGQRQHLLFPYPSSILSVK

SEQ ID NO: 119 - protein, 245 aa, Artificial Sequence
  Synthetic construct
DIQMTQSPSSLSASVGDRVTITCSASSSVSYMYWYQQKPGKAPKLLIYLTSNLASGVPSRFSGSGSGTDFTLTISSLQPEDFATYYCQQWRSNPFTFGQGTKLEIKGGGGSGGGGSGGGGSQITLKESGPTLVKPTQTLTLTCTFSGFSLSTSGMGVGWIRQPPGKALEWLAHIWWDDVKRYSPSLKSRLTITKDTSKNQVVLTMTNMDPVDTATYYCARIVSFDNDVVSAMDYWGQGTLVTVSS

SEQ ID NO: 120 - protein, 468 aa, Artificial Sequence
  Synthetic construct
DIQMTQSPSSLSASVGDRVTITCSASSSVSYMYWYQQKPGKAPKLLIYLTSNLASGVPSRFSGSGSGTDFTLTISSLQPEDFATYYCQQWRSNPFTFGQGTKLEIKGGGGSGGGGSGGGGSQITLKESGPTLVKPTQTLTLTCTFSGFSLSTSGMGVGWIRQPPGKALEWLAHIWWDDVKRYSPSLKSRLTITKDTSKNQVVLTMTNMDPVDTATYYCARIVSFDNDVVSAMDYWGQGTLVTVSSTTTPAPRPPTPAPTIASQPLSLRPEACRPAAGGAVHTRGLDFACDIYIWAPLAGTCGVLLLSLVITLYCKRGRKKLLYIFKQPFMRPVQTTQEEDGCSCRFPEEEEGGCELRVKFSRSADAPAYQQGQNQLYNELNLGRREEYDVLDKRRGRDPEMGGKPRRKNPQEGLYNELQKDKMAEAYSEIGMKGERRRGKGHDGLYQGLSTATKDTYDALHMQALPPR

SEQ ID NO: 121 - protein, 467 aa, Artificial Sequence
  Synthetic construct
DIQMTQSPSSLSASVGDRVTITCSASSSVSYMYWYQQKPGKAPKLLIYLTSNLASGVPSRFSGSGSGTDFTLTISSLQPEDFATYYCQQWRSNPFTFGQGTKLEIKGGGGSGGGGSGGGGSQITLKESGPTLVKPTQTLTLTCTFSGFSLSTSGMGVGWIRQPPGKALEWLAHIWWDDVKRYSPSLKSRLTITKDTSKNQVVLTMTNMDPVDTATYYCARIVSFDNDVVSAMDYWGQGTLVTVSSAAAIEVMYPPPYLDNEKSNGTIIHVKGKHLCPSPLFPGPSKPFWVLVVVGGVLACYSLLVTVAFIIFWVRSKRSRLLHSDYMNMTPRRPGPTRKHYQPYAPPRDFAAYRSRVKFSRSADAPAYQQGQNQLYNELNLGRREEYDVLDKRRGRDPEMGGKPRRKNPQEGLYNELQKDKMAEAYSEIGMKGERRRGKGHDGLYQGLSTATKDTYDALHMQALPPR

SEQ ID NO: 122 - protein, 239 aa, Artificial Sequence
  Synthetic construct
AIQLTQSPSSLSASVGDRVTITCRASENIYYNLAWYQQKPGKAPKLLIYTANSLEDGVPSRFSGSGSGTDFTLTISSLQPEDFATYFCKQAYDVPPTFGGGTKLEIKGGGGSGGGGSGGGGSQVQLVQSGAEVKKPGASVKVSCKASGYTFTRYWIHWIRQAPGQGLEWMGYINPTTVYTEFNQNFKDRVTMTRDTSTSTVYMELSSLRSEDTAVYYCARGGSNFFDYWGQGTTVTVSS

SEQ ID NO: 123 - protein, 462 aa, Artificial Sequence
  Synthetic construct
AIQLTQSPSSLSASVGDRVTITCRASENIYYNLAWYQQKPGKAPKLLIYTANSLEDGVPSRFSGSGSGTDFTLTISSLQPEDFATYFCKQAYDVPPTFGGGTKLEIKGGGGSGGGGSGGGGSQVQLVQSGAEVKKPGASVKVSCKASGYTFTRYWIHWIRQAPGQGLEWMGYINPTTVYTEFNQNFKDRVTMTRDTSTSTVYMELSSLRSEDTAVYYCARGGSNFFDYWGQGTTVTVSSTTTPAPRPPTPAPTIASQPLSLRPEACRPAAGGAVHTRGLDFACDIYIWAPLAGTCGVLLLSLVITLYCKRGRKKLLYIFKQPFMRPVQTTQEEDGCSCRFPEEEEGGCELRVKFSRSADAPAYQQGQNQLYNELNLGRREEYDVLDKRRGRDPEMGGKPRRKNPQEGLYNELQKDKMAEAYSEIGMKGERRRGKGHDGLYQGLSTATKDTYDALHMQALPPR

SEQ ID NO: 124 - protein, 461 aa, Artificial Sequence
  Synthetic construct
AIQLTQSPSSLSASVGDRVTITCRASENIYYNLAWYQQKPGKAPKLLIYTANSLEDGVPSRFSGSGSGTDFTLTISSLQPEDFATYFCKQAYDVPPTFGGGTKLEIKGGGGSGGGGSGGGGSQVQLVQSGAEVKKPGASVKVSCKASGYTFTRYWIHWIRQAPGQGLEWMGYINPTTVYTEFNQNFKDRVTMTRDTSTSTVYMELSSLRSEDTAVYYCARGGSNFFDYWGQGTTVTVSSAAAIEVMYPPPYLDNEKSNGTIIHVKGKHLCPSPLFPGPSKPFWVLVVVGGVLACYSLLVTVAFIIFWVRSKRSRLLHSDYMNMTPRRPGPTRKHYQPYAPPRDFAAYRSRVKFSRSADAPAYQQGQNQLYNELNLGRREEYDVLDKRRGRDPEMGGKPRRKNPQEGLYNELQKDKMAEAYSEIGMKGERRRGKGHDGLYQGLSTATKDTYDALHMQALPPR

SEQ ID NO: 125 - protein, 240 aa, Artificial Sequence
  Synthetic construct
EIVMTQSPATLSVSPGERATLSCKASQSVSNDVVWYQQKPGQAPRLLIYYASNRYTGIPARFSGSGSGTEFTLTISSLQSEDFAVYYCQQDYTSPWTFGQGTKLEIKGGGGSGGGGSGGGGSQVQLVQSGAEVKKPGASVKVSCKASGYTFTNYGMNWVRQAPGQGLEWMGWINTYTGEPTYADDFKGRVTMTTDTSTSTAYMELRSLRSDDTAVYYCARIGDSSPSDYWGQGTLVTVSS

SEQ ID NO: 126 - protein, 463 aa, Artificial Sequence
  Synthetic construct
EIVMTQSPATLSVSPGERATLSCKASQSVSNDVVWYQQKPGQAPRLLIYYASNRYTGIPARFSGSGSGTEFTLTISSLQSEDFAVYYCQQDYTSPWTFGQGTKLEIKGGGGSGGGGSGGGGSQVQLVQSGAEVKKPGASVKVSCKASGYTFTNYGMNWVRQAPGQGLEWMGWINTYTGEPTYADDFKGRVTMTTDTSTSTAYMELRSLRSDDTAVYYCARIGDSSPSDYWGQGTLVTVSSTTTPAPRPPTPAPTIASQPLSLRPEACRPAAGGAVHTRGLDFACDIYIWAPLAGTCGVLLLSLVITLYCKRGRKKLLYIFKQPFMRPVQTTQEEDGCSCRFPEEEEGGCELRVKFSRSADAPAYQQGQNQLYNELNLGRREEYDVLDKRRGRDPEMGGKPRRKNPQEGLYNELQKDKMAEAYSEIGMKGERRRGKGHDGLYQGLSTATKDTYDALHMQALPPR

SEQ ID NO: 127 - protein, 462 aa, Artificial Sequence
  Synthetic construct
EIVMTQSPATLSVSPGERATLSCKASQSVSNDVVWYQQKPGQAPRLLIYYASNRYTGIPARFSGSGSGTEFTLTISSLQSEDFAVYYCQQDYTSPWTFGQGTKLEIKGGGGSGGGGSGGGGSQVQLVQSGAEVKKPGASVKVSCKASGYTFTNYGMNWVRQAPGQGLEWMGWINTYTGEPTYADDFKGRVTMTTDTSTSTAYMELRSLRSDDTAVYYCARIGDSSPSDYWGQGTLVTVSSAAAIEVMYPPPYLDNEKSNGTIIHVKGKHLCPSPLFPGPSKPFWVLVVVGGVLACYSLLVTVAFIIFWVRSKRSRLLHSDYMNMTPRRPGPTRKHYQPYAPPRDFAAYRSRVKFSRSADAPAYQQGQNQLYNELNLGRREEYDVLDKRRGRDPEMGGKPRRKNPQEGLYNELQKDKMAEAYSEIGMKGERRRGKGHDGLYQGLSTATKDTYDALHMQALPPR

SEQ ID NO: 128 - protein, 245 aa, Artificial Sequence
  Synthetic construct
QIVLTQSPALMSASPGEKVTMTCSVTSSVSYMYWYQQKPRSSPKPWIYLTSNLASGVPARFSGSGSGTSYSLTISSVEAEDAATYYCQQWRNNPFTFGSGTKVEIKGGGGSGGGGSGGGGSQVTLKESGPGILQPSQTLSLTCSFSGFSLSTSGMGVGWIRQPSGKGLEWLALIWWDDVKRYNPALKSRLTISKDASSSQVFLKIASVDTADTATYYCARIASYDYDVVYAMDYWGQGTSVSVSS

SEQ ID NO: 129 - protein, 468 aa, Artificial Sequence
  Synthetic construct
QIVLTQSPALMSASPGEKVTMTCSVTSSVSYMYWYQQKPRSSPKPWIYLTSNLASGVPARFSGSGSGTSYSLTISSVEAEDAATYYCQQWRNNPFTFGSGTKVEIKGGGGSGGGGSGGGGSQVTLKESGPGILQPSQTLSLTCSFSGFSLSTSGMGVGWIRQPSGKGLEWLALIWWDDVKRYNPALKSRLTISKDASSSQVFLKIASVDTADTATYYCARIASYDYDVVYAMDYWGQGTSVSVSSTTTPAPRPPTPAPTIASQPLSLRPEACRPAAGGAVHTRGLDFACDIYIWAPLAGTCGVLLLSLVITLYCKRGRKKLLYIFKQPFMRPVQTTQEEDGCSCRFPEEEEGGCELRVKFSRSADAPAYQQGQNQLYNELNLGRREEYDVLDKRRGRDPEMGGKPRRKNPQEGLYNELQKDKMAEAYSEIGMKGERRRGKGHDGLYQGLSTATKDTYDALHMQALPPR

SEQ ID NO: 130 - protein, 467 aa, Artificial Sequence
  Synthetic construct
QIVLTQSPALMSASPGEKVTMTCSVTSSVSYMYWYQQKPRSSPKPWIYLTSNLASGVPARFSGSGSGTSYSLTISSVEAEDAATYYCQQWRNNPFTFGSGTKVEIKGGGGSGGGGSGGGGSQVTLKESGPGILQPSQTLSLTCSFSGFSLSTSGMGVGWIRQPSGKGLEWLALIWWDDVKRYNPALKSRLTISKDASSSQVFLKIASVDTADTATYYCARIASYDYDVVYAMDYWGQGTSVSVSSAAAIEVMYPPPYLDNEKSNGTIIHVKGKHLCPSPLFPGPSKPFWVLVVVGGVLACYSLLVTVAFIIFWVRSKRSRLLHSDYMNMTPRRPGPTRKHYQPYAPPRDFAAYRSRVKFSRSADAPAYQQGQNQLYNELNLGRREEYDVLDKRRGRDPEMGGKPRRKNPQEGLYNELQKDKMAEAYSEIGMKGERRRGKGHDGLYQGLSTATKDTYDALHMQALPPR

SEQ ID NO: 131 - protein, 241 aa, Artificial Sequence
  Synthetic construct
QVQLQESGPGLVKPSETLSLTCTVSGGSISSYYWSWIRQPPGKGLEWIGYVYYSGTTNYNPSLKSRVTISVDTSKNQFSLKLSSVTAADTAVYYCASIAVTGFYFDYWGQGTLVTVSSGGGGSGGGGSGGGGSEIVLTQSPGTLSLSPGERVTLSCRASQRVNNNYLAWYQQRPGQAPRLLIYGASSRATGIPDRFSGSGSGTDFTLTISRLEPEDFAVYYCQQYDRSPLTFGGGTKLEIK

SEQ ID NO: 132 - protein, 464 aa, Artificial Sequence
  Synthetic construct
QVQLQESGPGLVKPSETLSLTCTVSGGSISSYYWSWIRQPPGKGLEWIGYVYYSGTTNYNPSLKSRVTISVDTSKNQFSLKLSSVTAADTAVYYCASIAVTGFYFDYWGQGTLVTVSSGGGGSGGGGSGGGGSEIVLTQSPGTLSLSPGERVTLSCRASQRVNNNYLAWYQQRPGQAPRLLIYGASSRATGIPDRFSGSGSGTDFTLTISRLEPEDFAVYYCQQYDRSPLTFGGGTKLEIKTTTPAPRPPTPAPTIASQPLSLRPEACRPAAGGAVHTRGLDFACDIYIWAPLAGTCGVLLLSLVITLYCKRGRKKLLYIFKQPFMRPVQTTQEEDGCSCRFPEEEEGGCELRVKFSRSADAPAYQQGQNQLYNELNLGRREEYDVLDKRRGRDPEMGGKPRRKNPQEGLYNELQKDKMAEAYSEIGMKGERRRGKGHDGLYQGLSTATKDTYDALHMQALPPR

SEQ ID NO: 133 - protein, 463 aa, Artificial Sequence
  Synthetic construct
QVQLQESGPGLVKPSETLSLTCTVSGGSISSYYWSWIRQPPGKGLEWIGYVYYSGTTNYNPSLKSRVTISVDTSKNQFSLKLSSVTAADTAVYYCASIAVTGFYFDYWGQGTLVTVSSGGGGSGGGGSGGGGSEIVLTQSPGTLSLSPGERVTLSCRASQRVNNNYLAWYQQRPGQAPRLLIYGASSRATGIPDRFSGSGSGTDFTLTISRLEPEDFAVYYCQQYDRSPLTFGGGTKLEIKAAAIEVMYPPPYLDNEKSNGTIIHVKGKHLCPSPLFPGPSKPFWVLVVVGGVLACYSLLVTVAFIIFWVRSKRSRLLHSDYMNMTPRRPGPTRKHYQPYAPPRDFAAYRSRVKFSRSADAPAYQQGQNQLYNELNLGRREEYDVLDKRRGRDPEMGGKPRRKNPQEGLYNELQKDKMAEAYSEIGMKGERRRGKGHDGLYQGLSTATKDTYDALHMQALPPR

SEQ ID NO: 134 - protein, 240 aa, Artificial Sequence
  Synthetic construct
EIVLTQSPGTLSLSPGERATLSCHASQNINVWLSWYQQKPGQAPRLLIYKASNLHTGIPDRFSGSGSGTDFTLTISRLEPEDFAVYYCQQGQSYPFTFGQGTKVEIKGGGGSGGGGSGGGGSEVRLSQSGGQMKKPGESMRLSCRASGYTFTSYVMHWVRQAPGRRPEWIGYINPYNDATKYARKFQGRATLTSDKYSDTAFLELRSLTSDDTAVYYCARGGYDYDGDYWGRGAPVTVSS

SEQ ID NO: 135 - protein, 463 aa, Artificial Sequence
  Synthetic construct
EIVLTQSPGTLSLSPGERATLSCHASQNINVWLSWYQQKPGQAPRLLIYKASNLHTGIPDRFSGSGSGTDFTLTISRLEPEDFAVYYCQQGQSYPFTFGQGTKVEIKGGGGSGGGGSGGGGSEVRLSQSGGQMKKPGESMRLSCRASGYTFTSYVMHWVRQAPGRRPEWIGYINPYNDATKYARKFQGRATLTSDKYSDTAFLELRSLTSDDTAVYYCARGGYDYDGDYWGRGAPVTVSSTTTPAPRPPTPAPTIASQPLSLRPEACRPAAGGAVHTRGLDFACDIYIWAPLAGTCGVLLLSLVITLYCKRGRKKLLYIFKQPFMRPVQTTQEEDGCSCRFPEEEEGGCELRVKFSRSADAPAYQQGQNQLYNELNLGRREEYDVLDKRRGRDPEMGGKPRRKNPQEGLYNELQKDKMAEAYSEIGMKGERRRGKGHDGLYQGLSTATKDTYDALHMQALPPR

SEQ ID NO: 136 - protein, 462 aa, Artificial Sequence
  Synthetic construct
EIVLTQSPGTLSLSPGERATLSCHASQNINVWLSWYQQKPGQAPRLLIYKASNLHTGIPDRFSGSGSGTDFTLTISRLEPEDFAVYYCQQGQSYPFTFGQGTKVEIKGGGGSGGGGSGGGGSEVRLSQSGGQMKKPGESMRLSCRASGYTFTSYVMHWVRQAPGRRPEWIGYINPYNDATKYARKFQGRATLTSDKYSDTAFLELRSLTSDDTAVYYCARGGYDYDGDYWGRGAPVTVSSAAAIEVMYPPPYLDNEKSNGTIIHVKGKHLCPSPLFPGPSKPFWVLVVVGGVLACYSLLVTVAFIIFWVRSKRSRLLHSDYMNMTPRRPGPTRKHYQPYAPPRDFAAYRSRVKFSRSADAPAYQQGQNQLYNELNLGRREEYDVLDKRRGRDPEMGGKPRRKNPQEGLYNELQKDKMAEAYSEIGMKGERRRGKGHDGLYQGLSTATKDTYDALHMQALPPR

SEQ ID NO: 137 - protein, 760 aa, Homo sapiens
MKTWVKIVFGVATSAVLALLVMCIVLRPSRVHNSEENTMRALTLKDILNGTFSYKTFFPNWISGQEYLHQSADNNIVLYNIETGQSYTILSNRTMKSVNASNYGLSPDRQFVYLESDYSKLWRYSYTATYYIYDLSNGEFVRGNELPRPIQYLCWSPVGSKLAYVYQNNIYLKQRPGDPPFQITFNGRENKIFNGIPDWVYEEEMLATKYALWWSPNGKFLAYAEFNDTDIPVIAYSYYGDEQYPRTINIPYPKAGAKNPVVRIFIIDTTYPAYVGPQEVPVPAMIASSDYYFSWLTWVTDERVCLQWLKRVQNVSVLSICDFREDWQTWDCPKTQEHIEESRTGWAGGFFVSTPVFSYDAISYYKIFSDKDGYKHIHYIKDTVENAIQITSGKWEAINIFRVTQDSLFYSSNEFEEYPGRRNIYRISIGSYPPSKKCVTCHLRKERCQYYTASFSDYAKYYALVCYGPGIPISTLHDGRTDQEIKILEENKELENALKNIQLPKEEIKKLEVDEITLWYKMILPPQFDRSKKYPLLIQVYGGPCSQSVRSVFAVNWISYLASKEGMVIALVDGRGTAFQGDKLLYAVYRKLGVYEVEDQITAVRKFIEMGFIDEKRIAIWGWSYGGYVSSLALASGTGLFKCGIAVAPVSSWEYYASVYTERFMGLPTKDDNLEHYKNSTVMARAEYFRNVDYLLIHGTADDNVHFQNSAQIAKALVNAQVDFQAMWYSDQNHGLSGLSTNHLYTHMTHFLKQCFSLSD

SEQ ID NO: 138 - protein, 240 aa, Artificial Sequence
  Synthetic construct
EIVLTQSPGTLSLSPGERATLSCRASQSVTSSYLAWYQQKPGQAPRLLINVGSRRATGIPDRFSGSGSGTDFTLTISRLEPEDFAVYYCQQGIMLPPTFGQGTKVEIKGGGGSGGGGSGGGGSEVQLLESGGGLVQPGGSLRLSCAASGFTFSSYAMSWVRQAPGKGLEWVSAIIGSGASTYYADSVKGRFTISRDNSKNTLYLQMNSLRAEDTAVYYCAKGWFGGFNYWGQGTLVTVSS

SEQ ID NO: 139 - protein, 463 aa, Artificial Sequence
  Synthetic construct
EIVLTQSPGTLSLSPGERATLSCRASQSVTSSYLAWYQQKPGQAPRLLINVGSRRATGIPDRFSGSGSGTDFTLTISRLEPEDFAVYYCQQGIMLPPTFGQGTKVEIKGGGGSGGGGSGGGGSEVQLLESGGGLVQPGGSLRLSCAASGFTFSSYAMSWVRQAPGKGLEWVSAIIGSGASTYYADSVKGRFTISRDNSKNTLYLQMNSLRAEDTAVYYCAKGWFGGFNYWGQGTLVTVSSTTTPAPRPPTPAPTIASQPLSLRPEACRPAAGGAVHTRGLDFACDIYIWAPLAGTCGVLLLSLVITLYCKRGRKKLLYIFKQPFMRPVQTTQEEDGCSCRFPEEEEGGCELRVKFSRSADAPAYQQGQNQLYNELNLGRREEYDVLDKRRGRDPEMGGKPRRKNPQEGLYNELQKDKMAEAYSEIGMKGERRRGKGHDGLYQGLSTATKDTYDALHMQALPPR

SEQ ID NO: 140 - protein, 462 aa, Artificial Sequence
  Synthetic construct
EIVLTQSPGTLSLSPGERATLSCRASQSVTSSYLAWYQQKPGQAPRLLINVGSRRATGIPDRFSGSGSGTDFTLTISRLEPEDFAVYYCQQGIMLPPTFGQGTKVEIKGGGGSGGGGSGGGGSEVQLLESGGGLVQPGGSLRLSCAASGFTFSSYAMSWVRQAPGKGLEWVSAIIGSGASTYYADSVKGRFTISRDNSKNTLYLQMNSLRAEDTAVYYCAKGWFGGFNYWGQGTLVTVSSAAAIEVMYPPPYLDNEKSNGTIIHVKGKHLCPSPLFPGPSKPFWVLVVVGGVLACYSLLVTVAFIIFWVRSKRSRLLHSDYMNMTPRRPGPTRKHYQPYAPPRDFAAYRSRVKFSRSADAPAYQQGQNQLYNELNLGRREEYDVLDKRRGRDPEMGGKPRRKNPQEGLYNELQKDKMAEAYSEIGMKGERRRGKGHDGLYQGLSTATKDTYDALHMQALPPR

SEQ ID NO: 141 - protein, 245 aa, Artificial Sequence
  Synthetic construct
EIVLTQSPATLSLSPGERATLSCRASESVDNYGLSFINWFQQKPGQAPRLLIYGTSNRGSGIPARFSGSGSGTDFTLTISSLEPEDFAVYFCQQSNEVPYTFGGGTKVEIKGGGGSGGGGSGGGGSQVQLVQSGAEVKKPGASVKVSCKASGYTLTDYNMDWVRQAPGQGLEWIGDIYPNTGGTIYNQKFKGRVTMTIDTSTSTVYMELSSLRSEDTAVYYCTRFRGIHYAMDYWGQGTTVTVSS

SEQ ID NO: 142 - protein, 468 aa, Artificial Sequence
  Synthetic construct
EIVLTQSPATLSLSPGERATLSCRASESVDNYGLSFINWFQQKPGQAPRLLIYGTSNRGSGIPARFSGSGSGTDFTLTISSLEPEDFAVYFCQQSNEVPYTFGGGTKVEIKGGGGSGGGGSGGGGSQVQLVQSGAEVKKPGASVKVSCKASGYTLTDYNMDWVRQAPGQGLEWIGDIYPNTGGTIYNQKFKGRVTMTIDTSTSTVYMELSSLRSEDTAVYYCTRFRGIHYAMDYWGQGTTVTVSSTTTPAPRPPTPAPTIASQPLSLRPEACRPAAGGAVHTRGLDFACDIYIWAPLAGTCGVLLLSLVITLYCKRGRKKLLYIFKQPFMRPVQTTQEEDGCSCRFPEEEEGGCELRVKFSRSADAPAYQQGQNQLYNELNLGRREEYDVLDKRRGRDPEMGGKPRRKNPQEGLYNELQKDKMAEAYSEIGMKGERRRGKGHDGLYQGLSTATKDTYDALHMQALPPR

SEQ ID NO: 143 - protein, 467 aa, Artificial Sequence
  Synthetic construct
EIVLTQSPATLSLSPGERATLSCRASESVDNYGLSFINWFQQKPGQAPRLLIYGTSNRGSGIPARFSGSGSGTDFTLTISSLEPEDFAVYFCQQSNEVPYTFGGGTKVEIKGGGGSGGGGSGGGGSQVQLVQSGAEVKKPGASVKVSCKASGYTLTDYNMDWVRQAPGQGLEWIGDIYPNTGGTIYNQKFKGRVTMTIDTSTSTVYMELSSLRSEDTAVYYCTRFRGIHYAMDYWGQGTTVTVSSAAAIEVMYPPPYLDNEKSNGTIIHVKGKHLCPSPLFPGPSKPFWVLVVVGGVLACYSLLVTVAFIIFWVRSKRSRLLHSDYMNMTPRRPGPTRKHYQPYAPPRDFAAYRSRVKFSRSADAPAYQQGQNQLYNELNLGRREEYDVLDKRRGRDPEMGGKPRRKNPQEGLYNELQKDKMAEAYSEIGMKGERRRGKGHDGLYQGLSTATKDTYDALHMQALPPR

SEQ ID NO: 144 - protein, 579 aa, Homo sapiens
MSALRPLLLLLLPLCPGPGPGPGSEAKVTRSCAETRQVLGARGYSLNLIPPALISGEHLRVCPQEYTCCSSETEQRLIRETEATFRGLVEDSGSFLVHTLAARHRKFDEFFLEMLSVAQHSLTQLFSHSYGRLYAQHALIFNGLFSRLRDFYGESGEGLDDTLADFWAQLLERVFPLLHPQYSFPPDYLLCLSRLASSTDGSLQPFGDSPRRLRLQITRTLVAARAFVQGLETGRNVVSEALKVPVSEGCSQALMRLIGCPLCRGVPSLMPCQGFCLNVVRGCLSSRGLEPDWGNYLDGLLILADKLQGPFSFELTAESIGVKISEGLMYLQENSAKVSAQVFQECGPPDPVPARNRRAPPPREEAGRLWSMVTEEERPTTAAGTNLHRLVWELRERLARMRGFWARLSLTVCGDSRMAADASLEAAPCWTGAGRGRYLPPVVGGSPAEQVNNPELKVDASGPDVPTRRRRLQLRAATARMKTAALGHDLDGQDADEDASGSGGGQQYADDWMAGAVAPPARPPRPPYPPRRDGSGGKGGGGSARYNQGRSRSGGASIGFHTQTILILSLSALALLGPR

SEQ ID NO: 145 - protein, 241 aa, Artificial Sequence
  Synthetic construct
DIQMTQSPSTLSAFVGDRVTITCRASQSISSWLAWYQQKPGKAPKLLIYAASTLQSGVPSRFSGSGSGTEFTLTISSLQPEDFATYYCQQLNSYPITFGQGTRLEIKGGGGSGGGGSGGGGSEVQLVETGGGVVKPGGSLRLSCAASGFTFSDYYMSWIRQAPGKGLEWVSYISSSGSTIYYADSVKGRFTISRDNSKNTLYLQMNSLRAEDTAVYYCARESGYDYVFDYWGQGTLVAVSS

SEQ ID NO: 146 - protein, 464 aa, Artificial Sequence
  Synthetic construct
DIQMTQSPSTLSAFVGDRVTITCRASQSISSWLAWYQQKPGKAPKLLIYAASTLQSGVPSRFSGSGSGTEFTLTISSLQPEDFATYYCQQLNSYPITFGQGTRLEIKGGGGSGGGGSGGGGSEVQLVETGGGVVKPGGSLRLSCAASGFTFSDYYMSWIRQAPGKGLEWVSYISSSGSTIYYADSVKGRFTISRDNSKNTLYLQMNSLRAEDTAVYYCARESGYDYVFDYWGQGTLVAVSSTTTPAPRPPTPAPTIASQPLSLRPEACRPAAGGAVHTRGLDFACDIYIWAPLAGTCGVLLLSLVITLYCKRGRKKLLYIFKQPFMRPVQTTQEEDGCSCRFPEEEEGGCELRVKFSRSADAPAYQQGQNQLYNELNLGRREEYDVLDKRRGRDPEMGGKPRRKNPQEGLYNELQKDKMAEAYSEIGMKGERRRGKGHDGLYQGLSTATKDTYDALHMQALPPR

SEQ ID NO: 147 - protein, 463 aa, Artificial Sequence
  Synthetic construct
DIQMTQSPSTLSAFVGDRVTITCRASQSISSWLAWYQQKPGKAPKLLIYAASTLQSGVPSRFSGSGSGTEFTLTISSLQPEDFATYYCQQLNSYPITFGQGTRLEIKGGGGSGGGGSGGGGSEVQLVETGGGVVKPGGSLRLSCAASGFTFSDYYMSWIRQAPGKGLEWVSYISSSGSTIYYADSVKGRFTISRDNSKNTLYLQMNSLRAEDTAVYYCARESGYDYVFDYWGQGTLVAVSSAAAIEVMYPPPYLDNEKSNGTIIHVKGKHLCPSPLFPGPSKPFWVLVVVGGVLACYSLLVTVAFIIFWVRSKRSRLLHSDYMNMTPRRPGPTRKHYQPYAPPRDFAAYRSRVKFSRSADAPAYQQGQNQLYNELNLGRREEYDVLDKRRGRDPEMGGKPRRKNPQEGLYNELQKDKMAEAYSEIGMKGERRRGKGHDGLYQGLSTATKDTYDALHMQALPPR

SEQ ID NO: 148 - protein, 242 aa, Artificial Sequence
  Synthetic construct
DVVMTQSPLSLPVTPGEPASISCRSSQSLVHSNGNTYLHWYLQKPGQSPQLLIYKVSNRFSGVPDRFSGSGSGTDFTLKISRVEAEDVGVYYCSQNTHVPPTFGQGTKLEIKGGGGSGGGGSGGGGSQVQLVESGAEVKKPGASVKVSCKASGYTFTDYEMHWVRQAPGQGLEWMGALDPKTGDTAYSQKFKGRVTITADESTSTAYMELSSLRSEDTAVYYCARFYSYTYWGQGTLVTVSS

SEQ ID NO: 149 - protein, 465 aa, Artificial Sequence
  Synthetic construct
DVVMTQSPLSLPVTPGEPASISCRSSQSLVHSNGNTYLHWYLQKPGQSPQLLIYKVSNRFSGVPDRFSGSGSGTDFTLKISRVEAEDVGVYYCSQNTHVPPTFGQGTKLEIKGGGGSGGGGSGGGGSQVQLVESGAEVKKPGASVKVSCKASGYTFTDYEMHWVRQAPGQGLEWMGALDPKTGDTAYSQKFKGRVTITADESTSTAYMELSSLRSEDTAVYYCARFYSYTYWGQGTLVTVSSTTTPAPRPPTPAPTIASQPLSLRPEACRPAAGGAVHTRGLDFACDIYIWAPLAGTCGVLLLSLVITLYCKRGRKKLLYIFKQPFMRPVQTTQEEDGCSCRFPEEEEGGCELRVKFSRSADAPAYQQGQNQLYNELNLGRREEYDVLDKRRGRDPEMGGKPRRKNPQEGLYNELQKDKMAEAYSEIGMKGERRRGKGHDGLYQGLSTATKDTYDALHMQALPPR

SEQ ID NO: 150 - protein, 464 aa, Artificial Sequence
  Synthetic construct
DVVMTQSPLSLPVTPGEPASISCRSSQSLVHSNGNTYLHWYLQKPGQSPQLLIYKVSNRFSGVPDRFSGSGSGTDFTLKISRVEAEDVGVYYCSQNTHVPPTFGQGTKLEIKGGGGSGGGGSGGGGSQVQLVESGAEVKKPGASVKVSCKASGYTFTDYEMHWVRQAPGQGLEWMGALDPKTGDTAYSQKFKGRVTITADESTSTAYMELSSLRSEDTAVYYCARFYSYTYWGQGTLVTVSSAAAIEVMYPPPYLDNEKSNGTIIHVKGKHLCPSPLFPGPSKPFWVLVVVGGVLACYSLLVTVAFIIFWVRSKRSRLLHSDYMNMTPRRPGPTRKHYQPYAPPRDFAAYRSRVKFSRSADAPAYQQGQNQLYNELNLGRREEYDVLDKRRGRDPEMGGKPRRKNPQEGLYNELQKDKMAEAYSEIGMKGERRRGKGHDGLYQGLSTATKDTYDALHMQALPPR

SEQ ID NO: 151 - protein, 242 aa, Artificial Sequence
  Synthetic construct
DVVMTQTPLSLPVSLGDQASISCRSSQSLVHSNGNTYLHWYLQKPGQSPKLLIYKVSNRFSGVPDRFSGSGSGTDFTLKISRVEAEDLGVYFCSQNTHVPPTFGSGTKLEIKGGGGSGGGGSGGGGSQVQLQQSGAELVRPGASVKLSCKASGYTFTDYEMHWVKQTPVHGLKWIGALDPKTGDTAYSQKFKGKATLTADKSSSTAYMELRSLTSEDSAVYYCTRFYSYTYWGQGTLVTVSA

SEQ ID NO: 152 - protein, 465 aa, Artificial Sequence
  Synthetic construct
DVVMTQTPLSLPVSLGDQASISCRSSQSLVHSNGNTYLHWYLQKPGQSPKLLIYKVSNRFSGVPDRFSGSGSGTDFTLKISRVEAEDLGVYFCSQNTHVPPTFGSGTKLEIKGGGGSGGGGSGGGGSQVQLQQSGAELVRPGASVKLSCKASGYTFTDYEMHWVKQTPVHGLKWIGALDPKTGDTAYSQKFKGKATLTADKSSSTAYMELRSLTSEDSAVYYCTRFYSYTYWGQGTLVTVSATTTPAPRPPTPAPTIASQPLSLRPEACRPAAGGAVHTRGLDFACDIYIWAPLAGTCGVLLLSLVITLYCKRGRKKLLYIFKQPFMRPVQTTQEEDGCSCRFPEEEEGGCELRVKFSRSADAPAYQQGQNQLYNELNLGRREEYDVLDKRRGRDPEMGGKPRRKNPQEGLYNELQKDKMAEAYSEIGMKGERRRGKGHDGLYQGLSTATKDTYDALHMQALPPR

SEQ ID NO: 153 - protein, 464 aa, Artificial Sequence
  Synthetic construct
DVVMTQTPLSLPVSLGDQASISCRSSQSLVHSNGNTYLHWYLQKPGQSPKLLIYKVSNRFSGVPDRFSGSGSGTDFTLKISRVEAEDLGVYFCSQNTHVPPTFGSGTKLEIKGGGGSGGGGSGGGGSQVQLQQSGAELVRPGASVKLSCKASGYTFTDYEMHWVKQTPVHGLKWIGALDPKTGDTAYSQKFKGKATLTADKSSSTAYMELRSLTSEDSAVYYCTRFYSYTYWGQGTLVTVSAAAAIEVMYPPPYLDNEKSNGTIIHVKGKHLCPSPLFPGPSKPFWVLVVVGGVLACYSLLVTVAFIIFWVRSKRSRLLHSDYMNMTPRRPGPTRKHYQPYAPPRDFAAYRSRVKFSRSADAPAYQQGQNQLYNELNLGRREEYDVLDKRRGRDPEMGGKPRRKNPQEGLYNELQKDKMAEAYSEIGMKGERRRGKGHDGLYQGLSTATKDTYDALHMQALPPR

SEQ ID NO: 154 - protein, 116 aa, Artificial Sequence
  Synthetic construct
QVQLVQSGGGLVQPGGSLRLSCAASYFDFDSYEMSWVRQAPGKGLEWIGSIYHSGSTYYNPSLKSRVTISRDNSKNTLYLQMNTLRAEDTATYYCARVNMDRFDYWGQGTLVTVSS

SEQ ID NO: 155 - protein, 339 aa, Artificial Sequence
  Synthetic construct
QVQLVQSGGGLVQPGGSLRLSCAASYFDFDSYEMSWVRQAPGKGLEWIGSIYHSGSTYYNPSLKSRVTISRDNSKNTLYLQMNTLRAEDTATYYCARVNMDRFDYWGQGTLVTVSSTTTPAPRPPTPAPTIASQPLSLRPEACRPAAGGAVHTRGLDFACDIYIWAPLAGTCGVLLLSLVITLYCKRGRKKLLYIFKQPFMRPVQTTQEEDGCSCRFPEEEEGGCELRVKFSRSADAPAYQQGQNQLYNELNLGRREEYDVLDKRRGRDPEMGGKPRRKNPQEGLYNELQKDKMAEAYSEIGMKGERRRGKGHDGLYQGLSTATKDTYDALHMQALPPR

SEQ ID NO: 156 - protein, 338 aa, Artificial Sequence
  Synthetic construct
QVQLVQSGGGLVQPGGSLRLSCAASYFDFDSYEMSWVRQAPGKGLEWIGSIYHSGSTYYNPSLKSRVTISRDNSKNTLYLQMNTLRAEDTATYYCARVNMDRFDYWGQGTLVTVSSAAAIEVMYPPPYLDNEKSNGTIIHVKGKHLCPSPLFPGPSKPFWVLVVVGGVLACYSLLVTVAFIIFWVRSKRSRLLHSDYMNMTPRRPGPTRKHYQPYAPPRDFAAYRSRVKFSRSADAPAYQQGQNQLYNELNLGRREEYDVLDKRRGRDPEMGGKPRRKNPQEGLYNELQKDKMAEAYSEIGMKGERRRGKGHDGLYQGLSTATKDTYDALHMQALPPR

SEQ ID NO: 157 - protein, 239 aa, Artificial Sequence
  Synthetic construct
EVQLLESGGGLVQPGGSLRLSCAASGFTFSSYAMSWVRQAPGKGLEWVSTIQKQGLPTEYADSVKGRFTISRDNSKNTLYLQMNSLRAEDTAVYYCAKNRAKFDYWGQGTLVTVSSGGGGSGGGGSGGGGSTDIQMTQSPSSLSASVGDRVTITCRASQSISSYLNWYQQKPGKAPKLLIYNASMLQSGVPSRFSGSGSGTDFTLTISSLQPEDFATYYCQQNRGFPLTFGQGTKVEIK

SEQ ID NO: 158 - protein, 462 aa, Artificial Sequence
  Synthetic construct
EVQLLESGGGLVQPGGSLRLSCAASGFTFSSYAMSWVRQAPGKGLEWVSTIQKQGLPTEYADSVKGRFTISRDNSKNTLYLQMNSLRAEDTAVYYCAKNRAKFDYWGQGTLVTVSSGGGGSGGGGSGGGGSTDIQMTQSPSSLSASVGDRVTITCRASQSISSYLNWYQQKPGKAPKLLIYNASMLQSGVPSRFSGSGSGTDFTLTISSLQPEDFATYYCQQNRGFPLTFGQGTKVEIKTTTPAPRPPTPAPTIASQPLSLRPEACRPAAGGAVHTRGLDFACDIYIWAPLAGTCGVLLLSLVITLYCKRGRKKLLYIFKQPFMRPVQTTQEEDGCSCRFPEEEEGGCELRVKFSRSADAPAYQQGQNQLYNELNLGRREEYDVLDKRRGRDPEMGGKPRRKNPQEGLYNELQKDKMAEAYSEIGMKGERRRGKGHDGLYQGLSTATKDTYDALHMQALPPR

SEQ ID NO: 159 - protein, 461 aa, Artificial Sequence
  Synthetic construct
EVQLLESGGGLVQPGGSLRLSCAASGFTFSSYAMSWVRQAPGKGLEWVSTIQKQGLPTEYADSVKGRFTISRDNSKNTLYLQMNSLRAEDTAVYYCAKNRAKFDYWGQGTLVTVSSGGGGSGGGGSGGGGSTDIQMTQSPSSLSASVGDRVTITCRASQSISSYLNWYQQKPGKAPKLLIYNASMLQSGVPSRFSGSGSGTDFTLTISSLQPEDFATYYCQQNRGFPLTFGQGTKVEIKAAAIEVMYPPPYLDNEKSNGTIIHVKGKHLCPSPLFPGPSKPFWVLVVVGGVLACYSLLVTVAFIIFWVRSKRSRLLHSDYMNMTPRRPGPTRKHYQPYAPPRDFAAYRSRVKFSRSADAPAYQQGQNQLYNELNLGRREEYDVLDKRRGRDPEMGGKPRRKNPQEGLYNELQKDKMAEAYSEIGMKGERRRGKGHDGLYQGLSTATKDTYDALHMQALPPR

SEQ ID NO: 160 - protein, 243 aa, Artificial Sequence
  Synthetic construct
EVQLVQSGAEVKKPGASVKVSCKASGYTFSDYEMHWVRQAPGQGLEWMGAIHPGSGDTAYNQRFKGRVTITADKSTSTAYMELSSLRSEDTAVYYCARFYSYAYWGQGTLVTVSAGGGGSGGGGSGGGGSDIVMTQTPLSLPVTPGEPASISCRSSQSLVHSNGNTYLQWYLQKPGQSPQLLIYKVSNRFSGVPDRFSGSGSGTDFTLKISRVEAEDVGVYYCSQSIYVPYTFGQGTKLEIKR

SEQ ID NO: 161 - protein, 466 aa, Artificial Sequence
  Synthetic construct
EVQLVQSGAEVKKPGASVKVSCKASGYTFSDYEMHWVRQAPGQGLEWMGAIHPGSGDTAYNQRFKGRVTITADKSTSTAYMELSSLRSEDTAVYYCARFYSYAYWGQGTLVTVSAGGGGSGGGGSGGGGSDIVMTQTPLSLPVTPGEPASISCRSSQSLVHSNGNTYLQWYLQKPGQSPQLLIYKVSNRFSGVPDRFSGSGSGTDFTLKISRVEAEDVGVYYCSQSIYVPYTFGQGTKLEIKRTTTPAPRPPTPAPTIASQPLSLRPEACRPAAGGAVHTRGLDFACDIYIWAPLAGTCGVLLLSLVITLYCKRGRKKLLYIFKQPFMRPVQTTQEEDGCSCRFPEEEEGGCELRVKFSRSADAPAYQQGQNQLYNELNLGRREEYDVLDKRRGRDPEMGGKPRRKNPQEGLYNELQKDKMAEAYSEIGMKGERRRGKGHDGLYQGLSTATKDTYDALHMQALPPR

SEQ ID NO: 162 - protein, 465 aa, Artificial Sequence
  Synthetic construct
EVQLVQSGAEVKKPGASVKVSCKASGYTFSDYEMHWVRQAPGQGLEWMGAIHPGSGDTAYNQRFKGRVTITADKSTSTAYMELSSLRSEDTAVYYCARFYSYAYWGQGTLVTVSAGGGGSGGGGSGGGGSDIVMTQTPLSLPVTPGEPASISCRSSQSLVHSNGNTYLQWYLQKPGQSPQLLIYKVSNRFSGVPDRFSGSGSGTDFTLKISRVEAEDVGVYYCSQSIYVPYTFGQGTKLEIKRAAAIEVMYPPPYLDNEKSNGTIIHVKGKHLCPSPLFPGPSKPFWVLVVVGGVLACYSLLVTVAFIIFWVRSKRSRLLHSDYMNMTPRRPGPTRKHYQPYAPPRDFAAYRSRVKFSRSADAPAYQQGQNQLYNELNLGRREEYDVLDKRRGRDPEMGGKPRRKNPQEGLYNELQKDKMAEAYSEIGMKGERRRGKGHDGLYQGLSTATKDTYDALHMQALPPR

SEQ ID NO: 163 - protein, 245 aa, Artificial Sequence
  Synthetic construct
EVQLVETGGGMVQPEGSLKLSCAASGFTFNKNAMNWVRQAPGKGLEWVARIRNKTNNYATYYADSVKARFTISRDDSQSMLYLQMNNLKIEDTAMYYCVAGNSFAYWGQGTLVTVSAGGGGSGGGGSGGGGSDIVMSQSPSSLVVSIGEKVTMTCKSSQSLLYSSNQKNYLAWYQQKPGQSPKLLIYWASSRESGVPDRFTGSGSGTDFTLTISSVKAEDLAVYYCQQYYNYPLTFGAGTKLELK

SEQ ID NO: 164 - protein, 468 aa, Artificial Sequence
  Synthetic construct
EVQLVETGGGMVQPEGSLKLSCAASGFTFNKNAMNWVRQAPGKGLEWVARIRNKTNNYATYYADSVKARFTISRDDSQSMLYLQMNNLKIEDTAMYYCVAGNSFAYWGQGTLVTVSAGGGGSGGGGSGGGGSDIVMSQSPSSLVVSIGEKVTMTCKSSQSLLYSSNQKNYLAWYQQKPGQSPKLLIYWASSRESGVPDRFTGSGSGTDFTLTISSVKAEDLAVYYCQQYYNYPLTFGAGTKLELKTTTPAPRPPTPAPTIASQPLSLRPEACRPAAGGAVHTRGLDFACDIYIWAPLAGTCGVLLLSLVITLYCKRGRKKLLYIFKQPFMRPVQTTQEEDGCSCRFPEEEEGGCELRVKFSRSADAPAYQQGQNQLYNELNLGRREEYDVLDKRRGRDPEMGGKPRRKNPQEGLYNELQKDKMAEAYSEIGMKGERRRGKGHDGLYQGLSTATKDTYDALHMQALPPR

SEQ ID NO: 165 - protein, 467 aa, Artificial Sequence
  Synthetic construct
EVQLVETGGGMVQPEGSLKLSCAASGFTFNKNAMNWVRQAPGKGLEWVARIRNKTNNYATYYADSVKARFTISRDDSQSMLYLQMNNLKIEDTAMYYCVAGNSFAYWGQGTLVTVSAGGGGSGGGGSGGGGSDIVMSQSPSSLVVSIGEKVTMTCKSSQSLLYSSNQKNYLAWYQQKPGQSPKLLIYWASSRESGVPDRFTGSGSGTDFTLTISSVKAEDLAVYYCQQYYNYPLTFGAGTKLELKAAAIEVMYPPPYLDNEKSNGTIIHVKGKHLCPSPLFPGPSKPFWVLVVVGGVLACYSLLVTVAFIIFWVRSKRSRLLHSDYMNMTPRRPGPTRKHYQPYAPPRDFAAYRSRVKFSRSADAPAYQQGQNQLYNELNLGRREEYDVLDKRRGRDPEMGGKPRRKNPQEGLYNELQKDKMAEAYSEIGMKGERRRGKGHDGLYQGLSTATKDTYDALHMQALPPR

SEQ ID NO: 166 - protein, 243 aa, Artificial Sequence
  Synthetic construct
DIVMTQTPLSLPVITGEPASISCRSSQSLVHSNGNTYLQWYLQKPGQSPQLLIYKVSNRFSGVPDRFSGSGSGTDFTLKISRVEAEDVGVYYCSQSIYVPYTFGQGTKLEIKRGGGGSGGGGSGGGGSEVQLVQSGAEVKKPGASVKVSCKASGYTFSDYEMHWVRQAPGQGLEWMGAIHPGSGDTAYNQRFKGRVTITADKSTSTAYMELSSLRSEDTAVYYCARFYSYAYWGQGTLVTVSA

SEQ ID NO: 167 - protein, 466 aa, Artificial Sequence
  Synthetic construct
DIVMTQTPLSLPVITGEPASISCRSSQSLVHSNGNTYLQWYLQKPGQSPQLLIYKVSNRFSGVPDRFSGSGSGTDFTLKISRVEAEDVGVYYCSQSIYVPYTFGQGTKLEIKRGGGGSGGGGSGGGGSEVQLVQSGAEVKKPGASVKVSCKASGYTFSDYEMHWVRQAPGQGLEWMGAIHPGSGDTAYNQRFKGRVTITADKSTSTAYMELSSLRSEDTAVYYCARFYSYAYWGQGTLVTVSATTTPAPRPPTPAPTIASQPLSLRPEACRPAAGGAVHTRGLDFACDIYIWAPLAGTCGVLLLSLVITLYCKRGRKKLLYIFKQPFMRPVQTTQEEDGCSCRFPEEEEGGCELRVKFSRSADAPAYQQGQNQLYNELNLGRREEYDVLDKRRGRDPEMGGKPRRKNPQEGLYNELQKDKMAEAYSEIGMKGERRRGKGHDGLYQGLSTATKDTYDALHMQALPPR

SEQ ID NO: 168 - protein, 465 aa, Artificial Sequence
  Synthetic construct
DIVMTQTPLSLPVITGEPASISCRSSQSLVHSNGNTYLQWYLQKPGQSPQLLIYKVSNRFSGVPDRFSGSGSGTDFTLKISRVEAEDVGVYYCSQSIYVPYTFGQGTKLEIKRGGGGSGGGGSGGGGSEVQLVQSGAEVKKPGASVKVSCKASGYTFSDYEMHWVRQAPGQGLEWMGAIHPGSGDTAYNQRFKGRVTITADKSTSTAYMELSSLRSEDTAVYYCARFYSYAYWGQGTLVTVSAAAAIEVMYPPPYLDNEKSNGTIIHVKGKHLCPSPLFPGPSKPFWVLVVVGGVLACYSLLVTVAFIIFWVRSKRSRLLHSDYMNMTPRRPGPTRKHYQPYAPPRDFAAYRSRVKFSRSADAPAYQQGQNQLYNELNLGRREEYDVLDKRRGRDPEMGGKPRRKNPQEGLYNELQKDKMAEAYSEIGMKGERRRGKGHDGLYQGLSTATKDTYDALHMQALPPR

SEQ ID NO: 169 - protein, 244 aa, Artificial Sequence
  Synthetic construct
DIVMTQSPDSLAVSLGERVTMNCKSSQSLLYSSNQKNYLWYQQKPGQSPKLLIYWASSRESGVPDRFSGSGSGTDFTLTISSVQAEDVAVYYCQQYYNYPLTFGQGTKLELKGGGGSGGGGSGGGGSEVQLVESGGGLVQPGGSLKLSCAASGFTFNKNAMNWVRQAPGKGLEWVARIRNKTNNYATYYADSVKARFTISRDDSKNTLYLQMNSLKIEDTAVYYCVAGNSFAYWGQGTLVTVSS

SEQ ID NO: 170 - protein, 467 aa, Artificial Sequence
  Synthetic construct
DIVMTQSPDSLAVSLGERVTMNCKSSQSLLYSSNQKNYLWYQQKPGQSPKLLIYWASSRESGVPDRFSGSGSGTDFTLTISSVQAEDVAVYYCQQYYNYPLTFGQGTKLELKGGGGSGGGGSGGGGSEVQLVESGGGLVQPGGSLKLSCAASGFTFNKNAMNWVRQAPGKGLEWVARIRNKTNNYATYYADSVKARFTISRDDSKNTLYLQMNSLKIEDTAVYYCVAGNSFAYWGQGTLVTVSSTTTPAPRPPTPAPTIASQPLSLRPEACRPAAGGAVHTRGLDFACDIYIWAPLAGTCGVLLLSLVITLYCKRGRKKLLYIFKQPFMRPVQTTQEEDGCSCRFPEEEEGGCELRVKFSRSADAPAYQQGQNQLYNELNLGRREEYDVLDKRRGRDPEMGGKPRRKNPQEGLYNELQKDKMAEAYSEIGMKGERRRGKGHDGLYQGLSTATKDTYDALHMQALPPR

SEQ ID NO: 171 - protein, 466 aa, Artificial Sequence
  Synthetic construct
DIVMTQSPDSLAVSLGERVTMNCKSSQSLLYSSNQKNYLWYQQKPGQSPKLLIYWASSRESGVPDRFSGSGSGTDFTLTISSVQAEDVAVYYCQQYYNYPLTFGQGTKLELKGGGGSGGGGSGGGGSEVQLVESGGGLVQPGGSLKLSCAASGFTFNKNAMNWVRQAPGKGLEWVARIRNKTNNYATYYADSVKARFTISRDDSKNTLYLQMNSLKIEDTAVYYCVAGNSFAYWGQGTLVTVSSAAAIEVMYPPPYLDNEKSNGTIIHVKGKHLCPSPLFPGPSKPFWVLVVVGGVLACYSLLVTVAFIIFWVRSKRSRLLHSDYMNMTPRRPGPTRKHYQPYAPPRDFAAYRSRVKFSRSADAPAYQQGQNQLYNELNLGRREEYDVLDKRRGRDPEMGGKPRRKNPQEGLYNELQKDKMAEAYSEIGMKGERRRGKGHDGLYQGLSTATKDTYDALHMQALPPR

SEQ ID NO: 172 - protein, 245 aa, Artificial Sequence
  Synthetic construct
DIVMSQSPSSLVVSIGEKVTMTCKSSQSLLYSSNQKNYLAWYQQKPGQSPKLLIYWASSRESGVPDRFTGSGSGTDFTLTISSVKAEDLAVYYCQQYYNYPLTFGAGTKLELKGGGGSGGGGSGGGGSEVQLVETGGGMVQPEGSLKLSCAASGFTFNKNAMNWVRQAPGKGLEWVARIRNKTNNYATYYADSVKARFTISRDDSQSMLYLQMNNLKIEDTAMYYCVAGNSFAYWGQGTLVTVSA

SEQ ID NO: 173 - protein, 468 aa, Artificial Sequence
  Synthetic construct
DIVMSQSPSSLVVSIGEKVTMTCKSSQSLLYSSNQKNYLAWYQQKPGQSPKLLIYWASSRESGVPDRFTGSGSGTDFTLTISSVKAEDLAVYYCQQYYNYPLTFGAGTKLELKGGGGSGGGGSGGGGSEVQLVETGGGMVQPEGSLKLSCAASGFTFNKNAMNWVRQAPGKGLEWVARIRNKTNNYATYYADSVKARFTISRDDSQSMLYLQMNNLKIEDTAMYYCVAGNSFAYWGQGTLVTVSATTTPAPRPPTPAPTIASQPLSLRPEACRPAAGGAVHTRGLDFACDIYIWAPLAGTCGVLLLSLVITLYCKRGRKKLLYIFKQPFMRPVQTTQEEDGCSCRFPEEEEGGCELRVKFSRSADAPAYQQGQNQLYNELNLGRREEYDVLDKRRGRDPEMGGKPRRKNPQEGLYNELQKDKMAEAYSEIGMKGERRRGKGHDGLYQGLSTATKDTYDALHMQALPPR

SEQ ID NO: 174 - protein, 467 aa, Artificial Sequence
  Synthetic construct
DIVMSQSPSSLVVSIGEKVTMTCKSSQSLLYSSNQKNYLAWYQQKPGQSPKLLIYWASSRESGVPDRFTGSGSGTDFTLTISSVKAEDLAVYYCQQYYNYPLTFGAGTKLELKGGGGSGGGGSGGGGSEVQLVETGGGMVQPEGSLKLSCAASGFTFNKNAMNWVRQAPGKGLEWVARIRNKTNNYATYYADSVKARFTISRDDSQSMLYLQMNNLKIEDTAMYYCVAGNSFAYWGQGTLVTVSAAAAIEVMYPPPYLDNEKSNGTIIHVKGKHLCPSPLFPGPSKPFWVLVVVGGVLACYSLLVTVAFIIFWVRSKRSRLLHSDYMNMTPRRPGPTRKHYQPYAPPRDFAAYRSRVKFSRSADAPAYQQGQNQLYNELNLGRREEYDVLDKRRGRDPEMGGKPRRKNPQEGLYNELQKDKMAEAYSEIGMKGERRRGKGHDGLYQGLSTATKDTYDALHMQALPPR

SEQ ID NO: 175 - protein, 243 aa, Artificial Sequence
  Synthetic construct
DIVMTQTPLSLPVTPGEPASISCRSSQSLVHSNGNTYLQWYLQKPGQSPQLLIYKVSNRFSGVPDRFSGSGSGTDFTLKISRVEAEDVGVYYCSQSIYVPYTFGQGTKLEIKRGGGGSGGGGSGGGGSEVQLVQSGAEVKKPGASVKVSCKASGYTFSDYEMHWVRQAPGQGLEWMGAIHPGSGDTAYNQRFKGRVTITADKSTSTAYMELSSLRSEDTAVYYCARFYSYAYWGQGTLVTVSA

SEQ ID NO: 176 - protein, 466 aa, Artificial Sequence
  Synthetic construct
DIVMTQTPLSLPVTPGEPASISCRSSQSLVHSNGNTYLQWYLQKPGQSPQLLIYKVSNRFSGVPDRFSGSGSGTDFTLKISRVEAEDVGVYYCSQSIYVPYTFGQGTKLEIKRGGGGSGGGGSGGGGSEVQLVQSGAEVKKPGASVKVSCKASGYTFSDYEMHWVRQAPGQGLEWMGAIHPGSGDTAYNQRFKGRVTITADKSTSTAYMELSSLRSEDTAVYYCARFYSYAYWGQGTLVTVSATTTPAPRPPTPAPTIASQPLSLRPEACRPAAGGAVHTRGLDFACDIYIWAPLAGTCGVLLLSLVITLYCKRGRKKLLYIFKQPFMRPVQTTQEEDGCSCRFPEEEEGGCELRVKFSRSADAPAYQQGQNQLYNELNLGRREEYDVLDKRRGRDPEMGGKPRRKNPQEGLYNELQKDKMAEAYSEIGMKGERRRGKGHDGLYQGLSTATKDTYDALHMQALPPR

SEQ ID NO: 177 - protein, 466 aa, Artificial Sequence
  Synthetic construct
DIVMTQTPLSLPVTPGEPASISCRSSQSLVHSNGNTYLQWYLQKPGQSPQLLIYKVSNRFSGVPDRFSGSGSGTDFTLKISRVEAEDVGVYYCSQSIYVPYTFGQGTKLEIKRGGGGSGGGGSGGGGSEVQLVQSGAEVKKPGASVKVSCKASGYTFSDYEMHWVRQAPGQGLEWMGAIHPGSGDTAYNQRFKGRVTITADKSTSTAYMELSSLRSEDTAVYYCARFYSYAYWGQGTLVTVSAAAAAIEVMYPPPYLDNEKSNGTIIHVKGKHLCPSPLFPGPSKPFWVLVVVGGVLACYSLLVTVAFIIFWVRSKRSRLLHSDYMNMTPRRPGPTRKHYQPYAPPRDFAAYRSRVKFSRSADAPAYQQGQNQLYNELNLGRREEYDVLDKRRGRDPEMGGKPRRKNPQEGLYNELQKDKMAEAYSEIGMKGERRRGKGHDGLYQGLSTATKDTYDALHMQALPPR

SEQ ID NO: 178 - protein, 364 aa, Homo sapiens
MHPQVVILSLILHLADSVAGSVKVGGEAGPSVTLPCHYSGAVTSMCWNRGSCSLFTCQNGIVWTNGTHVTYRKDTRYKLLGDLSRRDVSLTIENTAVSDSGVYCCRVEHRGWFNDMKITVSLEIVPPKVTTTPIVTTVPTVTTVRTSTTVPTTTTVPMTTVPTTTVPTTMSIPTTTTVLTTMTVSTTTSVPTTTSIPTTTSVPVTTTVSTFVPPMPLPRQNHEPVATSPSSPQPAETHPTTLQGAIRREPTSSPLYSYTTDGNDTVTESSDGLWNNNQTQLFLEHSLLTANTTKGIYAGVCISVLVLLALLGVIIAKKYFFKKEVQQLSVSFSSLQIKALQNAVEKEVQAEDNIYIENSLYATD

SEQ ID NO: 179 - protein, 242 aa, Artificial Sequence
  Synthetic construct
DIQMTQSPSSLSASIGDRVTITCRASQGIRNDLGWYQQKPGKAPKRLIYAASSLQSGVPSRFSGSGSGTEFTLTISSLQPEDFATYYCLQHNSYPLTFGGGTKVEIKGGGGSGGGGSGGGGSQVQLQESGPGLVKPSETLSLTCTVSGGSVSSGGYYWSWIRQPPGKGLEWIGFIYYTGSTNYNPSLKSRVSISVDTSKNQFSLKLSSVTAADAAVYYCARDYDWSFHFDYWGQGTLVTVSS

SEQ ID NO: 180 - protein, 465 aa, Artificial Sequence
  Synthetic construct
DIQMTQSPSSLSASIGDRVTITCRASQGIRNDLGWYQQKPGKAPKRLIYAASSLQSGVPSRFSGSGSGTEFTLTISSLQPEDFATYYCLQHNSYPLTFGGGTKVEIKGGGGSGGGGSGGGGSQVQLQESGPGLVKPSETLSLTCTVSGGSVSSGGYYWSWIRQPPGKGLEWIGFIYYTGSTNYNPSLKSRVSISVDTSKNQFSLKLSSVTAADAAVYYCARDYDWSFHFDYWGQGTLVTVSSTTTPAPRPPTPAPTIASQPLSLRPEACRPAAGGAVHTRGLDFACDIYIWAPLAGTCGVLLLSLVITLYCKRGRKKLLYIFKQPFMRPVQTTQEEDGCSCRFPEEEEGGCELRVKFSRSADAPAYQQGQNQLYNELNLGRREEYDVLDKRRGRDPEMGGKPRRKNPQEGLYNELQKDKMAEAYSEIGMKGERRRGKGHDGLYQGLSTATKDTYDALHMQALPPR

SEQ ID NO: 181 - protein, 464 aa, Artificial Sequence
  Synthetic construct
DIQMTQSPSSLSASIGDRVTITCRASQGIRNDLGWYQQKPGKAPKRLIYAASSLQSGVPSRFSGSGSGTEFTLTISSLQPEDFATYYCLQHNSYPLTFGGGTKVEIKGGGGSGGGGSGGGGSQVQLQESGPGLVKPSETLSLTCTVSGGSVSSGGYYWSWIRQPPGKGLEWIGFIYYTGSTNYNPSLKSRVSISVDTSKNQFSLKLSSVTAADAAVYYCARDYDWSFHFDYWGQGTLVTVSSAAAIEVMYPPPYLDNEKSNGTIIHVKGKHLCPSPLFPGPSKPFWVLVVVGGVLACYSLLVTVAFIIFWVRSKRSRLLHSDYMNMTPRRPGPTRKHYQPYAPPRDFAAYRSRVKFSRSADAPAYQQGQNQLYNELNLGRREEYDVLDKRRGRDPEMGGKPRRKNPQEGLYNELQKDKMAEAYSEIGMKGERRRGKGHDGLYQGLSTATKDTYDALHMQALPPR

SEQ ID NO: 182 - protein, 242 aa, Artificial Sequence
  Synthetic construct
EIQMTQSPSSMSASLGDTITITCQATQDIFKNLNWYQQKPGKPPSLLIYYATELAEGVPSRFSGSGSGSDYSLTISNLESEDFAAYYCLQFFEFPFTFGSGTKLEMKGGGGSGGGGSGGGGSQVQLQQSGAELVRPGTSVKVSCKASGYVFTNYWIEWIKQRPGQGLEWIGVMNPGSGETTYNEKFKGKATLTADKSSSTAYMQLSSLTSVDSAVYFCARDHDRDYYAMDYWGQGTSWTVSS

SEQ ID NO: 183 - protein, 465 aa, Artificial Sequence
  Synthetic construct
EIQMTQSPSSMSASLGDTITITCQATQDIFKNLNWYQQKPGKPPSLLIYYATELAEGVPSRFSGSGSGSDYSLTISNLESEDFAAYYCLQFFEFPFTFGSGTKLEMKGGGGSGGGGSGGGGSQVQLQQSGAELVRPGTSVKVSCKASGYVFTNYWIEWIKQRPGQGLEWIGVMNPGSGETTYNEKFKGKATLTADKSSSTAYMQLSSLTSVDSAVYFCARDHDRDYYAMDYWGQGTSWTVSSTTTPAPRPPTPAPTIASQPLSLRPEACRPAAGGAVHTRGLDFACDIYIWAPLAGTCGVLLLSLVITLYCKRGRKKLLYIFKQPFMRPVQTTQEEDGCSCRFPEEEEGGCELRVKFSRSADAPAYQQGQNQLYNELNLGRREEYDVLDKRRGRDPEMGGKPRRKNPQEGLYNELQKDKMAEAYSEIGMKGERRRGKGHDGLYQGLSTATKDTYDALHMQALPPR

SEQ ID NO: 184 - protein, 464 aa, Artificial Sequence
  Synthetic construct
EIQMTQSPSSMSASLGDTITITCQATQDIFKNLNWYQQKPGKPPSLLIYYATELAEGVPSRFSGSGSGSDYSLTISNLESEDFAAYYCLQFFEFPFTFGSGTKLEMKGGGGSGGGGSGGGGSQVQLQQSGAELVRPGTSVKVSCKASGYVFTNYWIEWIKQRPGQGLEWIGVMNPGSGETTYNEKFKGKATLTADKSSSTAYMQLSSLTSVDSAVYFCARDHDRDYYAMDYWGQGTSWTVSSAAAIEVMYPPPYLDNEKSNGTIIHVKGKHLCPSPLFPGPSKPFWVLVVVGGVLACYSLLVTVAFIIFWVRSKRSRLLHSDYMNMTPRRPGPTRKHYQPYAPPRDFAAYRSRVKFSRSADAPAYQQGQNQLYNELNLGRREEYDVLDKRRGRDPEMGGKPRRKNPQEGLYNELQKDKMAEAYSEIGMKGERRRGKGHDGLYQGLSTATKDTYDALHMQALPPR

SEQ ID NO: 185 - protein, 373 aa, Artificial Sequence
  Synthetic construct
HSDYMNMTPRRPGPTRKHYQPQLLGLLLLWFPGARCDIQMTQSPSSLSASIGDRVTITCRASQGIRNDLGWYQQKPGKAPKRLIYAASSLQSGVPSRFSGSGSGTEFTLTISSLQPEDFATYYCLQHNSYPLTFGGGTKVEIKRTVAAPSVFIFPPSDEQLKSGTASVVCLLNNFYPREAKVQWKVDNAGGGGSGGGGSGGGGSWVLSQVQLQESGPGLVKPSETLSLTCTVSGGSVSSGGYYWSWIRQPPGKGLEWIGFIYYTGSTNYNPSLKSRVSISVDTSKNQFSLKLSSVTAADAAVYYCARDYDWSFHFDYWGQGTLVTVSSASTKGPSVFPLAPCSRSTSESTAALGCLVKDYFPEPVTVSWNSGA

SEQ ID NO: 186 - protein, 596 aa, Artificial Sequence
  Synthetic construct
HSDYMNMTPRRPGPTRKHYQPQLLGLLLLWFPGARCDIQMTQSPSSLSASIGDRVTITCRASQGIRNDLGWYQQKPGKAPKRLIYAASSLQSGVPSRFSGSGSGTEFTLTISSLQPEDFATYYCLQHNSYPLTFGGGTKVEIKRTVAAPSVFIFPPSDEQLKSGTASVVCLLNNFYPREAKVQWKVDNAGGGGSGGGGSGGGGSWVLSQVQLQESGPGLVKPSETLSLTCTVSGGSVSSGGYYWSWIRQPPGKGLEWIGFIYYTGSTNYNPSLKSRVSISVDTSKNQFSLKLSSVTAADAAVYYCARDYDWSFHFDYWGQGTLVTVSSASTKGPSVFPLAPCSRSTSESTAALGCLVKDYFPEPVTVSWNSGATTTPAPRPPTPAPTIASQPLSLRPEACRPAAGGAVHTRGLDFACDIYIWAPLAGTCGVLLLSLVITLYCKRGRKKLLYIFKQPFMRPVQTTQEEDGCSCRFPEEEEGGCELRVKFSRSADAPAYQQGQNQLYNELNLGRREEYDVLDKRRGRDPEMGGKPRRKNPQEGLYNELQKDKMAEAYSEIGMKGERRRGKGHDGLYQGLSTATKDTYDALHMQALPPR

SEQ ID NO: 187 - protein, 595 aa, Artificial Sequence
  Synthetic construct
HSDYMNMTPRRPGPTRKHYQPQLLGLLLLWFPGARCDIQMTQSPSSLSASIGDRVTITCRASQGIRNDLGWYQQKPGKAPKRLIYAASSLQSGVPSRFSGSGSGTEFTLTISSLQPEDFATYYCLQHNSYPLTFGGGTKVEIKRTVAAPSVFIFPPSDEQLKSGTASVVCLLNNFYPREAKVQWKVDNAGGGGSGGGGSGGGGSWVLSQVQLQESGPGLVKPSETLSLTCTVSGGSVSSGGYYWSWIRQPPGKGLEWIGFIYYTGSTNYNPSLKSRVSISVDTSKNQFSLKLSSVTAADAAVYYCARDYDWSFHFDYWGQGTLVTVSSASTKGPSVFPLAPCSRSTSESTAALGCLVKDYFPEPVTVSWNSGAAAAIEVMYPPPYLDNEKSNGTIIHVKGKHLCPSPLFPGPSKPFWVLVVVGGVLACYSLLVTVAFIIFWVRSKRSRLLHSDYMNMTPRRPGPTRKHYQPYAPPRDFAAYRSRVKFSRSADAPAYQQGQNQLYNELNLGRREEYDVLDKRRGRDPEMGGKPRRKNPQEGLYNELQKDKMAEAYSEIGMKGERRRGKGHDGLYQGLSTATKDTYDALHMQALPPR

SEQ ID NO: 188 - protein, 581 aa, Homo sapiens
MPLKHYLLLLVGCQAWGAGLAYHGCPSECTCSRASQVECTGARIVAVPTPLPWNAMSLQILNTHITELNESPFLNISALIALRIEKNELSRITPGAFRNLGSLRYLSLANNKLQVLPIGLFQGLDSLESLLLSSNQLLQIQPAHFSQCSNLKELQLHGNHLEYIPDGAFDHLVGLTKLNLGKNSLTHISPRVFQHLGNLQVLRLYENRLTDIPMGTFDGLVNLQELALQQNQIGLLSPGLFHNNHNLQRLYLSNNHISQLPPSVFMQLPQLNRLTLFGNSLKELSPGIFGPMPNLRELWLYDNHISSLPDNVFSNLRQLQVLILSRNQISFISPGAFNGLTELRELSLHTNALQDLDGNVFRMLANLQNISLQNNRLRQLPGNIFANVNGLMAIQLQNNQLENLPLGIFDHLGKLCELRLYDNPWRCDSDILPLRNWLLLNQPRLGTDTVPVCFSPANVRGQSLIIINVNVAVPSVHVPEVPSYPETPWYPDTPSYPDTTSVSSTTELTSPVEDYTDLTTIQVTDDRSVWGMTQAQSGLAIAAIVIGIVALACSLAACVGCCCCKKRSQAVLMQMKAPNEC

SEQ ID NO: 189 - protein, 247 aa, Artificial Sequence
  Synthetic construct
DIVMTQSPDSLAVSLGERATINCKSSQSLLNSRTRKNYLAWYQQKPGQSPKLLIYWASTRESGVPDRFSGSGSGTDFTLTISSLQAEDVAVYYCKQSYNLPTFGGGTKVEIKGGGGSGGGGSGGGGSEVQLVESGGGLVQPGGSLRLSCAVSGFSLTSYGVHWVRQATGKGLEWLGVIWAGGSTNYNSALMSRLTISKENAKSSVYLQMNSLRAGDTAMYYCATHMITEDYYGMDYWGQGTTVTVSS

SEQ ID NO: 190 - protein, 470 aa, Artificial Sequence
  Synthetic construct
DIVMTQSPDSLAVSLGERATINCKSSQSLLNSRTRKNYLAWYQQKPGQSPKLLIYWASTRESGVPDRFSGSGSGTDFTLTISSLQAEDVAVYYCKQSYNLPTFGGGTKVEIKGGGGSGGGGSGGGGSEVQLVESGGGLVQPGGSLRLSCAVSGFSLTSYGVHWVRQATGKGLEWLGVIWAGGSTNYNSALMSRLTISKENAKSSVYLQMNSLRAGDTAMYYCATHMITEDYYGMDYWGQGTTVTVSSTTTPAPRPPTPAPTIASQPLSLRPEACRPAAGGAVHTRGLDFACDIYIWAPLAGTCGVLLLSLVITLYCKRGRKKLLYIFKQPFMRPVQTTQEEDGCSCRFPEEEEGGCELRVKFSRSADAPAYQQGQNQLYNELNLGRREEYDVLDKRRGRDPEMGGKPRRKNPQEGLYNELQKDKMAEAYSEIGMKGERRRGKGHDGLYQGLSTATKDTYDALHMQALPPR

SEQ ID NO: 191 - protein, 469 aa, Artificial Sequence
  Synthetic construct
DIVMTQSPDSLAVSLGERATINCKSSQSLLNSRTRKNYLAWYQQKPGQSPKLLIYWASTRESGVPDRFSGSGSGTDFTLTISSLQAEDVAVYYCKQSYNLPTFGGGTKVEIKGGGGSGGGGSGGGGSEVQLVESGGGLVQPGGSLRLSCAVSGFSLTSYGVHWVRQATGKGLEWLGVIWAGGSTNYNSALMSRLTISKENAKSSVYLQMNSLRAGDTAMYYCATHMITEDYYGMDYWGQGTTVTVSSAAAIEVMYPPPYLDNEKSNGTIIHVKGKHLCPSPLFPGPSKPFWVLVVVGGVLACYSLLVTVAFIIFWVRSKRSRLLHSDYMNMTPRRPGPTRKHYQPYAPPRDFAAYRSRVKFSRSADAPAYQQGQNQLYNELNLGRREEYDVLDKRRGRDPEMGGKPRRKNPQEGLYNELQKDKMAEAYSEIGMKGERRRGKGHDGLYQGLSTATKDTYDALHMQALPPR

SEQ ID NO: 192 - protein, 244 aa, Artificial Sequence
  Synthetic construct
DIVLTQSPDSLAVSLGERATINCRASQSVSTSSYSYMHWYQQKPGQPPKLLIKYASSLESGVPDRFSGSGSGTDFTLTISSLQAEDVAVYYCEQSWEIRTFGGGTKVEIKGGGGSGGGGSGGGGSEVQLVQSGAEVKKPGSSVKVSCKASGFTFTDYYIHWVKQAPGQGLEWIGLVYPYIGGTNYNQKFKGKATLTVDTSTTTAYMEMSSLRSEDTAVYYCARGDNKYDAMDYWGQGTTVTVSS

SEQ ID NO: 193 - protein, 467 aa, Artificial Sequence
  Synthetic construct
DIVLTQSPDSLAVSLGERATINCRASQSVSTSSYSYMHWYQQKPGQPPKLLIKYASSLESGVPDRFSGSGSGTDFTLTISSLQAEDVAVYYCEQSWEIRTFGGGTKVEIKGGGGSGGGGSGGGGSEVQLVQSGAEVKKPGSSVKVSCKASGFTFTDYYIHWVKQAPGQGLEWIGLVYPYIGGTNYNQKFKGKATLTVDTSTTTAYMEMSSLRSEDTAVYYCARGDNKYDAMDYWGQGTTVTVSSTTTPAPRPPTPAPTIASQPLSLRPEACRPAAGGAVHTRGLDFACDIYIWAPLAGTCGVLLLSLVITLYCKRGRKKLLYIFKQPFMRPVQTTQEEDGCSCRFPEEEEGGCELRVKFSRSADAPAYQQGQNQLYNELNLGRREEYDVLDKRRGRDPEMGGKPRRKNPQEGLYNELQKDKMAEAYSEIGMKGERRRGKGHDGLYQGLSTATKDTYDALHMQALPPR

SEQ ID NO: 194 - protein, 466 aa, Artificial Sequence
  Synthetic construct
DIVLTQSPDSLAVSLGERATINCRASQSVSTSSYSYMHWYQQKPGQPPKLLIKYASSLESGVPDRFSGSGSGTDFTLTISSLQAEDVAVYYCEQSWEIRTFGGGTKVEIKGGGGSGGGGSGGGGSEVQLVQSGAEVKKPGSSVKVSCKASGFTFTDYYIHWVKQAPGQGLEWIGLVYPYIGGTNYNQKFKGKATLTVDTSTTTAYMEMSSLRSEDTAVYYCARGDNKYDAMDYWGQGTTVTVSSAAAIEVMYPPPYLDNEKSNGTIIHVKGKHLCPSPLFPGPSKPFWVLVVVGGVLACYSLLVTVAFIIFWVRSKRSRLLHSDYMNMTPRRPGPTRKHYQPYAPPRDFAAYRSRVKFSRSADAPAYQQGQNQLYNELNLGRREEYDVLDKRRGRDPEMGGKPRRKNPQEGLYNELQKDKMAEAYSEIGMKGERRRGKGHDGLYQGLSTATKDTYDALHMQALPPR

SEQ ID NO: 195 - protein, 242 aa, Artificial Sequence
  Synthetic construct
DIQMTQSPSSLSASVGDRVTITCRASQDISNYLNWYQQKPGGAVKFLIYYTSRLHSGVPSRFSGSGSGTDYTLTISSLQPEDFATYFCQQGEALPWTFGGGTKVEIKGGGGSGGGGSGGGGSEVQLVQSGAEVKKPGASVKVSCKASGYKFSSYWIEWVKQAPGQGLEWIGEILPGSDTTNYNEKFKDRATFTSDTSINTAYMELSRLRSDDTAVYYCARDRGNYRAWFGYWGQGTLVTVSS

SEQ ID NO: 196 - protein, 465 aa, Artificial Sequence
  Synthetic construct
DIQMTQSPSSLSASVGDRVTITCRASQDISNYLNWYQQKPGGAVKFLIYYTSRLHSGVPSRFSGSGSGTDYTLTISSLQPEDFATYFCQQGEALPWTFGGGTKVEIKGGGGSGGGGSGGGGSEVQLVQSGAEVKKPGASVKVSCKASGYKFSSYWIEWVKQAPGQGLEWIGEILPGSDTTNYNEKFKDRATFTSDTSINTAYMELSRLRSDDTAVYYCARDRGNYRAWFGYWGQGTLVTVSSTTTPAPRPPTPAPTIASQPLSLRPEACRPAAGGAVHTRGLDFACDIYIWAPLAGTCGVLLLSLVITLYCKRGRKKLLYIFKQPFMRPVQTTQEEDGCSCRFPEEEEGGCELRVKFSRSADAPAYQQGQNQLYNELNLGRREEYDVLDKRRGRDPEMGGKPRRKNPQEGLYNELQKDKMAEAYSEIGMKGERRRGKGHDGLYQGLSTATKDTYDALHMQALPPR

SEQ ID NO: 197 - protein, 464 aa, Artificial Sequence
  Synthetic construct
DIQMTQSPSSLSASVGDRVTITCRASQDISNYLNWYQQKPGGAVKFLIYYTSRLHSGVPSRFSGSGSGTDYTLTISSLQPEDFATYFCQQGEALPWTFGGGTKVEIKGGGGSGGGGSGGGGSEVQLVQSGAEVKKPGASVKVSCKASGYKFSSYWIEWVKQAPGQGLEWIGEILPGSDTTNYNEKFKDRATFTSDTSINTAYMELSRLRSDDTAVYYCARDRGNYRAWFGYWGQGTLVTVSSAAAIEVMYPPPYLDNEKSNGTIIHVKGKHLCPSPLFPGPSKPFWVLVVVGGVLACYSLLVTVAFIIFWVRSKRSRLLHSDYMNMTPRRPGPTRKHYQPYAPPRDFAAYRSRVKFSRSADAPAYQQGQNQLYNELNLGRREEYDVLDKRRGRDPEMGGKPRRKNPQEGLYNELQKDKMAEAYSEIGMKGERRRGKGHDGLYQGLSTATKDTYDALHMQALPPR

SEQ ID NO: 198 - protein, 243 aa, Artificial Sequence
  Synthetic construct
DIQMTQSPSSLSASVGDRVTITCKSSQSVLYSSNQKNYLAWFQQKPGKAPKLLIYWASTRESGVPSRFSGSGSGTDFTLTISSLQPEDFATYFCHQYLSSYTFGQGTKVEIKGGGGSGGGGSGGGGSEVQLVESGGGLVQPGGSLRLSCAASGYTFTTYWMHWVRQAPGKGLEWVGYIRPSTGYTEYNQKFKDRFTISADTSKNTAYLQMNSLRAEDTAVYYCARSRWLLDYWGQGTLVTVSS

SEQ ID NO: 199 - protein, 466 aa, Artificial Sequence
  Synthetic construct
DIQMTQSPSSLSASVGDRVTITCKSSQSVLYSSNQKNYLAWFQQKPGKAPKLLIYWASTRESGVPSRFSGSGSGTDFTLTISSLQPEDFATYFCHQYLSSYTFGQGTKVEIKGGGGSGGGGSGGGGSEVQLVESGGGLVQPGGSLRLSCAASGYTFTTYWMHWVRQAPGKGLEWVGYIRPSTGYTEYNQKFKDRFTISADTSKNTAYLQMNSLRAEDTAVYYCARSRWLLDYWGQGTLVTVSSTTTPAPRPPTPAPTIASQPLSLRPEACRPAAGGAVHTRGLDFACDIYIWAPLAGTCGVLLLSLVITLYCKRGRKKLLYIFKQPFMRPVQTTQEEDGCSCRFPEEEEGGCELRVKFSRSADAPAYQQGQNQLYNELNLGRREEYDVLDKRRGRDPEMGGKPRRKNPQEGLYNELQKDKMAEAYSEIGMKGERRRGKGHDGLYQGLSTATKDTYDALHMQALPPR

SEQ ID NO: 200 - protein, 465 aa, Artificial Sequence
  Synthetic construct
DIQMTQSPSSLSASVGDRVTITCKSSQSVLYSSNQKNYLAWFQQKPGKAPKLLIYWASTRESGVPSRFSGSGSGTDFTLTISSLQPEDFATYFCHQYLSSYTFGQGTKVEIKGGGGSGGGGSGGGGSEVQLVESGGGLVQPGGSLRLSCAASGYTFTTYWMHWVRQAPGKGLEWVGYIRPSTGYTEYNQKFKDRFTISADTSKNTAYLQMNSLRAEDTAVYYCARSRWLLDYWGQGTLVTVSSAAAIEVMYPPPYLDNEKSNGTIIHVKGKHLCPSPLFPGPSKPFWVLVVVGGVLACYSLLVTVAFIIFWVRSKRSRLLHSDYMNMTPRRPGPTRKHYQPYAPPRDFAAYRSRVKFSRSADAPAYQQGQNQLYNELNLGRREEYDVLDKRRGRDPEMGGKPRRKNPQEGLYNELQKDKMAEAYSEIGMKGERRRGKGHDGLYQGLSTATKDTYDALHMQALPPR

SEQ ID NO: 201 - protein, 241 aa, Artificial Sequence
  Synthetic construct
QVQLQQSGAEVKKPGASVKVSCKASGYTFTGYYMHWVRQAPGQGLEWMGWINPNSGGTNYAQNFQGRVTMTRDTSISTAYMELRRLRSDDTAVYYCASGWDFDYWGQGTLVTVSSGGGGSGGGGSGGGGSGGGGSDIRMTQSPSSLSASVGDRVTITCRASQSIRYYLSWYQQKPGKAPKLLIYTASILQNGVPSRFSGSGSGTDFTLTISSLQPEDFATYYCLQTYTTPDFGPGTKVEIK

SEQ ID NO: 202 - protein, 464 aa, Artificial Sequence
  Synthetic construct
QVQLQQSGAEVKKPGASVKVSCKASGYTFTGYYMHWVRQAPGQGLEWMGWINPNSGGTNYAQNFQGRVTMTRDTSISTAYMELRRLRSDDTAVYYCASGWDFDYWGQGTLVTVSSGGGGSGGGGSGGGGSGGGGSDIRMTQSPSSLSASVGDRVTITCRASQSIRYYLSWYQQKPGKAPKLLIYTASILQNGVPSRFSGSGSGTDFTLTISSLQPEDFATYYCLQTYTTPDFGPGTKVEIKTTTPAPRPPTPAPTIASQPLSLRPEACRPAAGGAVHTRGLDFACDIYIWAPLAGTCGVLLLSLVITLYCKRGRKKLLYIFKQPFMRPVQTTQEEDGCSCRFPEEEEGGCELRVKFSRSADAPAYQQGQNQLYNELNLGRREEYDVLDKRRGRDPEMGGKPRRKNPQEGLYNELQKDKMAEAYSEIGMKGERRRGKGHDGLYQGLSTATKDTYDALHMQALPPR

SEQ ID NO: 203 - protein, 463 aa, Artificial Sequence
  Synthetic construct
QVQLQQSGAEVKKPGASVKVSCKASGYTFTGYYMHWVRQAPGQGLEWMGWINPNSGGTNYAQNFQGRVTMTRDTSISTAYMELRRLRSDDTAVYYCASGWDFDYWGQGTLVTVSSGGGGSGGGGSGGGGSGGGGSDIRMTQSPSSLSASVGDRVTITCRASQSIRYYLSWYQQKPGKAPKLLIYTASILQNGVPSRFSGSGSGTDFTLTISSLQPEDFATYYCLQTYTTPDFGPGTKVEIKAAAIEVMYPPPYLDNEKSNGTIIHVKGKHLCPSPLFPGPSKPFWVLVVVGGVLACYSLLVTVAFIIFWVRSKRSRLLHSDYMNMTPRRPGPTRKHYQPYAPPRDFAAYRSRVKFSRSADAPAYQQGQNQLYNELNLGRREEYDVLDKRRGRDPEMGGKPRRKNPQEGLYNELQKDKMAEAYSEIGMKGERRRGKGHDGLYQGLSTATKDTYDALHMQALPPR

SEQ ID NO: 204 - protein, 242 aa, Artificial Sequence
  Synthetic construct
DIQMTQSPSSLSASVGDRVTITCRASQSISSYLNWYQQKPGPKAPKLLIYAASSLQSGVPSGFSGSGSGTDFTLTISSLQPEDFATYYCQQSYSTPLTFGGGTKVEIKGGGGSGGGGSGGGGSQVQLQESGPGLVKPSETLSLTCTVSGGSVSSGSYYWSWIRQPPGKGLEWRGYIYYSGSTNYNPSLKSRVTISVDTSKNQFSLKLSSVTAADTAVYYCAREGKNGAFDIWGQGTMVTVSS

SEQ ID NO: 205 - protein, 465 aa, Artificial Sequence
  Synthetic construct
DIQMTQSPSSLSASVGDRVTITCRASQSISSYLNWYQQKPGPKAPKLLIYAASSLQSGVPSGFSGSGSGTDFTLTISSLQPEDFATYYCQQSYSTPLTFGGGTKVEIKGGGGSGGGGSGGGGSQVQLQESGPGLVKPSETLSLTCTVSGGSVSSGSYYWSWIRQPPGKGLEWRGYIYYSGSTNYNPSLKSRVTISVDTSKNQFSLKLSSVTAADTAVYYCAREGKNGAFDIWGQGTMVTVSSTTTPAPRPPTPAPTIASQPLSLRPEACRPAAGGAVHTRGLDFACDIYIWAPLAGTCGVLLLSLVITLYCKRGRKKLLYIFKQPFMRPVQTTQEEDGCSCRFPEEEEGGCELRVKFSRSADAPAYQQGQNQLYNELNLGRREEYDVLDKRRGRDPEMGGKPRRKNPQEGLYNELQKDKMAEAYSEIGMKGERRRGKGHDGLYQGLSTATKDTYDALHMQALPPR

SEQ ID NO: 206 - protein, 464 aa, Artificial Sequence
  Synthetic construct
DIQMTQSPSSLSASVGDRVTITCRASQSISSYLNWYQQKPGPKAPKLLIYAASSLQSGVPSGFSGSGSGTDFTLTISSLQPEDFATYYCQQSYSTPLTFGGGTKVEIKGGGGSGGGGSGGGGSQVQLQESGPGLVKPSETLSLTCTVSGGSVSSGSYYWSWIRQPPGKGLEWRGYIYYSGSTNYNPSLKSRVTISVDTSKNQFSLKLSSVTAADTAVYYCAREGKNGAFDIWGQGTMVTVSSAAAIEVMYPPPYLDNEKSNGTIIHVKGKHLCPSPLFPGPSKPFWVLVVVGGVLACYSLLVTVAFIIFWVRSKRSRLLHSDYMNMTPRRPGPTRKHYQPYAPPRDFAAYRSRVKFSRSADAPAYQQGQNQLYNELNLGRREEYDVLDKRRGRDPEMGGKPRRKNPQEGLYNELQKDKMAEAYSEIGMKGERRRGKGHDGLYQGLSTATKDTYDALHMQALPPR

SEQ ID NO: 207 - protein, 246 aa, Artificial Sequence
  Synthetic construct
DIALTQPASVSGSPGQSITISCTGTSSDIGGYNSVSWYQQHPGKAPKLMIYGVNNRPSGVSNRFSGSKSGNTASLTISGLQAEDEADYYCSSYDIESATPVFGGGTKLTVLGGGGSGGGGSGGGGSQVELVQSGAEVKKPGESLKISCKGSGYSFTSYWIGWVRQAPGKGLEWMGIIDPGDSRTRYSPSFQGQVTISADKSISTAYLQWSSLKASDTAMYYCARGQLYGGTYMDGWGQGTLVTVSS

SEQ ID NO: 208 - protein, 469 aa, Artificial Sequence
  Synthetic construct
DIALTQPASVSGSPGQSITISCTGTSSDIGGYNSVSWYQQHPGKAPKLMIYGVNNRPSGVSNRFSGSKSGNTASLTISGLQAEDEADYYCSSYDIESATPVFGGGTKLTVLGGGGSGGGGSGGGGSQVELVQSGAEVKKPGESLKISCKGSGYSFTSYWIGWVRQAPGKGLEWMGIIDPGDSRTRYSPSFQGQVTISADKSISTAYLQWSSLKASDTAMYYCARGQLYGGTYMDGWGQGTLVTVSSTTTPAPRPPTPAPTIASQPLSLRPEACRPAAGGAVHTRGLDFACDIYIWAPLAGTCGVLLLSLVITLYCKRGRKKLLYIFKQPFMRPVQTTQEEDGCSCRFPEEEEGGCELRVKFSRSADAPAYQQGQNQLYNELNLGRREEYDVLDKRRGRDPEMGGKPRRKNPQEGLYNELQKDKMAEAYSEIGMKGERRRGKGHDGLYQGLSTATKDTYDALHMQALPPR

SEQ ID NO: 209 - protein, 468 aa, Artificial Sequence
  Synthetic construct
DIALTQPASVSGSPGQSITISCTGTSSDIGGYNSVSWYQQHPGKAPKLMIYGVNNRPSGVSNRFSGSKSGNTASLTISGLQAEDEADYYCSSYDIESATPVFGGGTKLTVLGGGGSGGGGSGGGGSQVELVQSGAEVKKPGESLKISCKGSGYSFTSYWIGWVRQAPGKGLEWMGIIDPGDSRTRYSPSFQGQVTISADKSISTAYLQWSSLKASDTAMYYCARGQLYGGTYMDGWGQGTLVTVSSAAAIEVMYPPPYLDNEKSNGTIIHVKGKHLCPSPLFPGPSKPFWVLVVVGGVLACYSLLVTVAFIIFWVRSKRSRLLHSDYMNMTPRRPGPTRKHYQPYAPPRDFAAYRSRVKFSRSADAPAYQQGQNQLYNELNLGRREEYDVLDKRRGRDPEMGGKPRRKNPQEGLYNELQKDKMAEAYSEIGMKGERRRGKGHDGLYQGLSTATKDTYDALHMQALPPR

SEQ ID NO: 210 - protein, 259 aa, Artificial Sequence
  Synthetic construct
QVQLQQSGPGLVTPSQTLSLTCAISGDSVSSNSATWNWIRQSPSRGLEWLGRTYYRSKWYNDYAVSVKSRMSINPDTSKNQFSLQLNSVTPEDTAVYYCARGMMTYYYGMDVWGQGTTVTVSSGILGSGGGGSGGGGSGGGGSQPVLTQSSSLSASPGASASLTCTLRSGINVGPYRIYWYQQKPGSPPQYLLNYKSDSDKQQGSGVPSRFSGSKDASANAGVLLISGLRSEDEADYYCMIWHSSAAVFGGGTQLTVLS

SEQ ID NO: 211 - protein, 482 aa, Artificial Sequence
  Synthetic construct
QVQLQQSGPGLVTPSQTLSLTCAISGDSVSSNSATWNWIRQSPSRGLEWLGRTYYRSKWYNDYAVSVKSRMSINPDTSKNQFSLQLNSVTPEDTAVYYCARGMMTYYYGMDVWGQGTTVTVSSGILGSGGGGSGGGGSGGGGSQPVLTQSSSLSASPGASASLTCTLRSGINVGPYRIYWYQQKPGSPPQYLLNYKSDSDKQQGSGVPSRFSGSKDASANAGVLLISGLRSEDEADYYCMIWHSSAAVFGGGTQLTVLSTTTPAPRPPTPAPTIASQPLSLRPEACRPAAGGAVHTRGLDFACDIYIWAPLAGTCGVLLLSLVITLYCKRGRKKLLYIFKQPFMRPVQTTQEEDGCSCRFPEEEEGGCELRVKFSRSADAPAYQQGQNQLYNELNLGRREEYDVLDKRRGRDPEMGGKPRRKNPQEGLYNELQKDKMAEAYSEIGMKGERRRGKGHDGLYQGLSTATKDTYDALHMQALPPR

SEQ ID NO: 212 - protein, 481 aa, Artificial Sequence
  Synthetic construct
QVQLQQSGPGLVTPSQTLSLTCAISGDSVSSNSATWNWIRQSPSRGLEWLGRTYYRSKWYNDYAVSVKSRMSINPDTSKNQFSLQLNSVTPEDTAVYYCARGMMTYYYGMDVWGQGTTVTVSSGILGSGGGGSGGGGSGGGGSQPVLTQSSSLSASPGASASLTCTLRSGINVGPYRIYWYQQKPGSPPQYLLNYKSDSDKQQGSGVPSRFSGSKDASANAGVLLISGLRSEDEADYYCMIWHSSAAVFGGGTQLTVLSAAAIEVMYPPPYLDNEKSNGTIIHVKGKHLCPSPLFPGPSKPFWVLVVVGGVLACYSLLVTVAFIIFWVRSKRSRLLHSDYMNMTPRRPGPTRKHYQPYAPPRDFAAYRSRVKFSRSADAPAYQQGQNQLYNELNLGRREEYDVLDKRRGRDPEMGGKPRRKNPQEGLYNELQKDKMAEAYSEIGMKGERRRGKGHDGLYQGLSTATKDTYDALHMQALPPR

SEQ ID NO: 213 - protein, 116 aa, Artificial Sequence
  Synthetic construct
QVQLVESGGGVVQAGGSLRLSCAASGSTFSIRAMRWYRQAPGTERDLVAVIYGSSTYYADAVKGRFTISRDNSKNTLYLQMNSLRAEDTAVYYCNADTIGTARDYWGQGTLVTVSS

SEQ ID NO: 214 - protein, 339 aa, Artificial Sequence
  Synthetic construct
QVQLVESGGGVVQAGGSLRLSCAASGSTFSIRAMRWYRQAPGTERDLVAVIYGSSTYYADAVKGRFTISRDNSKNTLYLQMNSLRAEDTAVYYCNADTIGTARDYWGQGTLVTVSSTTTPAPRPPTPAPTIASQPLSLRPEACRPAAGGAVHTRGLDFACDIYIWAPLAGTCGVLLLSLVITLYCKRGRKKLLYIFKQPFMRPVQTTQEEDGCSCRFPEEEEGGCELRVKFSRSADAPAYQQGQNQLYNELNLGRREEYDVLDKRRGRDPEMGGKPRRKNPQEGLYNELQKDKMAEAYSEIGMKGERRRGKGHDGLYQGLSTATKDTYDALHMQALPPR

SEQ ID NO: 215 - protein, 338 aa, Artificial Sequence
  Synthetic construct
QVQLVESGGGVVQAGGSLRLSCAASGSTFSIRAMRWYRQAPGTERDLVAVIYGSSTYYADAVKGRFTISRDNSKNTLYLQMNSLRAEDTAVYYCNADTIGTARDYWGQGTLVTVSSAAAIEVMYPPPYLDNEKSNGTIIHVKGKHLCPSPLFPGPSKPFWVLVVVGGVLACYSLLVTVAFIIFWVRSKRSRLLHSDYMNMTPRRPGPTRKHYQPYAPPRDFAAYRSRVKFSRSADAPAYQQGQNQLYNELNLGRREEYDVLDKRRGRDPEMGGKPRRKNPQEGLYNELQKDKMAEAYSEIGMKGERRRGKGHDGLYQGLSTATKDTYDALHMQALPPR

SEQ ID NO: 216 - protein, 111 aa, Artificial Sequence
  Synthetic construct
EVQLVESGGGLVQPGGSLRLSCAASGGDWSANFMYWYRQAPGKQRELVARISGRGVVDYVESVKGRFTISRDNSKNTLYLQMNSLRAEDTAVYYCAVASYWGQGTLVTVSS

SEQ ID NO: 217 - protein, 334 aa, Artificial Sequence
  Synthetic construct
EVQLVESGGGLVQPGGSLRLSCAASGGDWSANFMYWYRQAPGKQRELVARISGRGVVDYVESVKGRFTISRDNSKNTLYLQMNSLRAEDTAVYYCAVASYWGQGTLVTVSSTTTPAPRPPTPAPTIASQPLSLRPEACRPAAGGAVHTRGLDFACDIYIWAPLAGTCGVLLLSLVITLYCKRGRKKLLYIFKQPFMRPVQTTQEEDGCSCRFPEEEEGGCELRVKFSRSADAPAYQQGQNQLYNELNLGRREEYDVLDKRRGRDPEMGGKPRRKNPQEGLYNELQKDKMAEAYSEIGMKGERRRGKGHDGLYQGLSTATKDTYDALHMQALPPR

SEQ ID NO: 218 - protein, 333 aa, Artificial Sequence
  Synthetic construct
EVQLVESGGGLVQPGGSLRLSCAASGGDWSANFMYWYRQAPGKQRELVARISGRGVVDYVESVKGRFTISRDNSKNTLYLQMNSLRAEDTAVYYCAVASYWGQGTLVTVSSAAAIEVMYPPPYLDNEKSNGTIIHVKGKHLCPSPLFPGPSKPFWVLVVVGGVLACYSLLVTVAFIIFWVRSKRSRLLHSDYMNMTPRRPGPTRKHYQPYAPPRDFAAYRSRVKFSRSADAPAYQQGQNQLYNELNLGRREEYDVLDKRRGRDPEMGGKPRRKNPQEGLYNELQKDKMAEAYSEIGMKGERRRGKGHDGLYQGLSTATKDTYDALHMQALPPR

SEQ ID NO: 219 - protein, 119 aa, Artificial Sequence
  Synthetic construct
EVQLVESGGGLVQPGGSLRLSCAASGSTSSINTMYWYRQAPGKERELVAFISSGGSTNVRDSVKGRFTISRDNSKNTLYLQMNSLRAEDTAVYYCNTYIPYGGTLHDFWGQGTLVTVSS

SEQ ID NO: 220 - protein, 342 aa, Artificial Sequence
  Synthetic construct
EVQLVESGGGLVQPGGSLRLSCAASGSTSSINTMYWYRQAPGKERELVAFISSGGSTNVRDSVKGRFTISRDNSKNTLYLQMNSLRAEDTAVYYCNTYIPYGGTLHDFWGQGTLVTVSSTTTPAPRPPTPAPTIASQPLSLRPEACRPAAGGAVHTRGLDFACDIYIWAPLAGTCGVLLLSLVITLYCKRGRKKLLYIFKQPFMRPVQTTQEEDGCSCRFPEEEEGGCELRVKFSRSADAPAYQQGQNQLYNELNLGRREEYDVLDKRRGRDPEMGGKPRRKNPQEGLYNELQKDKMAEAYSEIGMKGERRRGKGHDGLYQGLSTATKDTYDALHMQALPPR

SEQ ID NO: 221 - protein, 341 aa, Artificial Sequence
  Synthetic construct
EVQLVESGGGLVQPGGSLRLSCAASGSTSSINTMYWYRQAPGKERELVAFISSGGSTNVRDSVKGRFTISRDNSKNTLYLQMNSLRAEDTAVYYCNTYIPYGGTLHDFWGQGTLVTVSSAAAIEVMYPPPYLDNEKSNGTIIHVKGKHLCPSPLFPGPSKPFWVLVVVGGVLACYSLLVTVAFIIFWVRSKRSRLLHSDYMNMTPRRPGPTRKHYQPYAPPRDFAAYRSRVKFSRSADAPAYQQGQNQLYNELNLGRREEYDVLDKRRGRDPEMGGKPRRKNPQEGLYNELQKDKMAEAYSEIGMKGERRRGKGHDGLYQGLSTATKDTYDALHMQALPPR

SEQ ID NO: 222 - protein, 240 aa, Artificial Sequence
  Synthetic construct
QVQLQQSGPELEKPGASVKLSCKASGYSFTGYTMNWVKQSHGKSLEWIGLITPYNGASSYNQKFRGKATLTVDKSSSTAYMDLLSLTSEDSAVYFCARGGYDGRGFDYWGQGTTVTVSSGGGGSGGGGSGGGGSDIELTQSPAIMSASPGEKVTMTCSASSSVSYMHWYQQKSGTSPKRWIYDTSKLASGVPGRFSGSGSGNSYSLTISSVEAEDDATYYCQQWSKHPLTFGAGTKLEIK

SEQ ID NO: 223 - protein, 463 aa, Artificial Sequence
  Synthetic construct
QVQLQQSGPELEKPGASVKLSCKASGYSFTGYTMNWVKQSHGKSLEWIGLITPYNGASSYNQKFRGKATLTVDKSSSTAYMDLLSLTSEDSAVYFCARGGYDGRGFDYWGQGTTVTVSSGGGGSGGGGSGGGGSDIELTQSPAIMSASPGEKVTMTCSASSSVSYMHWYQQKSGTSPKRWIYDTSKLASGVPGRFSGSGSGNSYSLTISSVEAEDDATYYCQQWSKHPLTFGAGTKLEIKTTTPAPRPPTPAPTIASQPLSLRPEACRPAAGGAVHTRGLDFACDIYIWAPLAGTCGVLLLSLVITLYCKRGRKKLLYIFKQPFMRPVQTTQEEDGCSCRFPEEEEGGCELRVKFSRSADAPAYQQGQNQLYNELNLGRREEYDVLDKRRGRDPEMGGKPRRKNPQEGLYNELQKDKMAEAYSEIGMKGERRRGKGHDGLYQGLSTATKDTYDALHMQALPPR

SEQ ID NO: 224 - protein, 462 aa, Artificial Sequence
  Synthetic construct
QVQLQQSGPELEKPGASVKLSCKASGYSFTGYTMNWVKQSHGKSLEWIGLITPYNGASSYNQKFRGKATLTVDKSSSTAYMDLLSLTSEDSAVYFCARGGYDGRGFDYWGQGTTVTVSSGGGGSGGGGSGGGGSDIELTQSPAIMSASPGEKVTMTCSASSSVSYMHWYQQKSGTSPKRWIYDTSKLASGVPGRFSGSGSGNSYSLTISSVEAEDDATYYCQQWSKHPLTFGAGTKLEIKAAAIEVMYPPPYLDNEKSNGTIIHVKGKHLCPSPLFPGPSKPFWVLVVVGGVLACYSLLVTVAFIIFWVRSKRSRLLHSDYMNMTPRRPGPTRKHYQPYAPPRDFAAYRSRVKFSRSADAPAYQQGQNQLYNELNLGRREEYDVLDKRRGRDPEMGGKPRRKNPQEGLYNELQKDKMAEAYSEIGMKGERRRGKGHDGLYQGLSTATKDTYDALHMQALPPR

SEQ ID NO: 225 - protein, 250 aa, Artificial Sequence
  Synthetic construct
EVQLVESGGGLVQPGGSLRLSCAASGFDLGFYFYACWVRQAPGKGLEWVSCIYTAGSGSTYYASWAKGRFTISRDNSKNTLYLQMNSLRAEDTAVYYCARSTANTRSTYYLNLWGQGTLVTVSSGGGGSGGGGSGGGGSDIQMTQSPSSLSASVGDRVTITCQASQRISSYLSWYQQKPGKVPKLLIYGASTLASGVPSRFSGSGSGTDFTLTISSLQPEDVATYYCQSYAYFDSNNWHAFGGGTKVEIK

SEQ ID NO: 226 - protein, 473 aa, Artificial Sequence
  Synthetic construct
EVQLVESGGGLVQPGGSLRLSCAASGFDLGFYFYACWVRQAPGKGLEWVSCIYTAGSGSTYYASWAKGRFTISRDNSKNTLYLQMNSLRAEDTAVYYCARSTANTRSTYYLNLWGQGTLVTVSSGGGGSGGGGSGGGGSDIQMTQSPSSLSASVGDRVTITCQASQRISSYLSWYQQKPGKVPKLLIYGASTLASGVPSRFSGSGSGTDFTLTISSLQPEDVATYYCQSYAYFDSNNWHAFGGGTKVEIKTTTPAPRPPTPAPTIASQPLSLRPEACRPAAGGAVHTRGLDFACDIYIWAPLAGTCGVLLLSLVITLYCKRGRKKLLYIFKQPFMRPVQTTQEEDGCSCRFPEEEEGGCELRVKFSRSADAPAYQQGQNQLYNELNLGRREEYDVLDKRRGRDPEMGGKPRRKNPQEGLYNELQKDKMAEAYSEIGMKGERRRGKGHDGLYQGLSTATKDTYDALHMQALPPR

SEQ ID NO: 227 - protein, 472 aa, Artificial Sequence
  Synthetic construct
EVQLVESGGGLVQPGGSLRLSCAASGFDLGFYFYACWVRQAPGKGLEWVSCIYTAGSGSTYYASWAKGRFTISRDNSKNTLYLQMNSLRAEDTAVYYCARSTANTRSTYYLNLWGQGTLVTVSSGGGGSGGGGSGGGGSDIQMTQSPSSLSASVGDRVTITCQASQRISSYLSWYQQKPGKVPKLLIYGASTLASGVPSRFSGSGSGTDFTLTISSLQPEDVATYYCQSYAYFDSNNWHAFGGGTKVEIKAAAIEVMYPPPYLDNEKSNGTIIHVKGKHLCPSPLFPGPSKPFWVLVVVGGVLACYSLLVTVAFIIFWVRSKRSRLLHSDYMNMTPRRPGPTRKHYQPYAPPRDFAAYRSRVKFSRSADAPAYQQGQNQLYNELNLGRREEYDVLDKRRGRDPEMGGKPRRKNPQEGLYNELQKDKMAEAYSEIGMKGERRRGKGHDGLYQGLSTATKDTYDALHMQALPPR

SEQ ID NO: 228 - protein, 240 aa, Artificial Sequence
  Synthetic construct
DIELTQSPAIMSASPGEKVTMTCSASSSVSYMHWYQQKSGTSPKRWIYDTSKLASGVPGRFSGSGSGNSYSLTISSVEAEDDATYYCQQWSKHPLTFGAGTKLEIKGGGGSGGGGSGGGGSQVQLQQSGPELEKPGASVKLSCKASGYSFTGYTMNWVKQSHGKSLEWIGLITPYNGASSYNQKFRGKATLTVDKSSSTAYMDLLSLTSEDSAVYFCARGGYDGRGFDYWGQGTTVTVSS

SEQ ID NO: 229 - protein, 463 aa, Artificial Sequence
  Synthetic construct
DIELTQSPAIMSASPGEKVTMTCSASSSVSYMHWYQQKSGTSPKRWIYDTSKLASGVPGRFSGSGSGNSYSLTISSVEAEDDATYYCQQWSKHPLTFGAGTKLEIKGGGGSGGGGSGGGGSQVQLQQSGPELEKPGASVKLSCKASGYSFTGYTMNWVKQSHGKSLEWIGLITPYNGASSYNQKFRGKATLTVDKSSSTAYMDLLSLTSEDSAVYFCARGGYDGRGFDYWGQGTTVTVSSTTTPAPRPPTPAPTIASQPLSLRPEACRPAAGGAVHTRGLDFACDIYIWAPLAGTCGVLLLSLVITLYCKRGRKKLLYIFKQPFMRPVQTTQEEDGCSCRFPEEEEGGCELRVKFSRSADAPAYQQGQNQLYNELNLGRREEYDVLDKRRGRDPEMGGKPRRKNPQEGLYNELQKDKMAEAYSEIGMKGERRRGKGHDGLYQGLSTATKDTYDALHMQALPPR

SEQ ID NO: 230 - protein, 462 aa, Artificial Sequence
  Synthetic construct
DIELTQSPAIMSASPGEKVTMTCSASSSVSYMHWYQQKSGTSPKRWIYDTSKLASGVPGRFSGSGSGNSYSLTISSVEAEDDATYYCQQWSKHPLTFGAGTKLEIKGGGGSGGGGSGGGGSQVQLQQSGPELEKPGASVKLSCKASGYSFTGYTMNWVKQSHGKSLEWIGLITPYNGASSYNQKFRGKATLTVDKSSSTAYMDLLSLTSEDSAVYFCARGGYDGRGFDYWGQGTTVTVSSAAAIEVMYPPPYLDNEKSNGTIIHVKGKHLCPSPLFPGPSKPFWVLVVVGGVLACYSLLVTVAFIIFWVRSKRSRLLHSDYMNMTPRRPGPTRKHYQPYAPPRDFAAYRSRVKFSRSADAPAYQQGQNQLYNELNLGRREEYDVLDKRRGRDPEMGGKPRRKNPQEGLYNELQKDKMAEAYSEIGMKGERRRGKGHDGLYQGLSTATKDTYDALHMQALPPR

SEQ ID NO: 231 - protein, 250 aa, Artificial Sequence
  Synthetic construct
VKLQESGGGFVKPGGSLKVSCAASGFTFSSYAMSWVRLSPEMRLEWVATISSAGGYIFYSDSVQGRFTISRDNAKNTLHLQMGSLRSGDTAMYYCARQGFGNYGDYYAMDYWGQGTTVTVSSGGGGSGGGGSGGGGSDIELTQSPSSLAVSAGEKVTMSCKSSQSLLNSRTRKNQLAWYQQKPGQSPELLIYWASTRQSGVPDRFTGSGSGTDFTLTISSVQAEDLAVYYCQQSYNLLTFGPGTKLEVKR

SEQ ID NO: 232 - protein, 473 aa, Artificial Sequence
  Synthetic construct
VKLQESGGGFVKPGGSLKVSCAASGFTFSSYAMSWVRLSPEMRLEWVATISSAGGYIFYSDSVQGRFTISRDNAKNTLHLQMGSLRSGDTAMYYCARQGFGNYGDYYAMDYWGQGTTVTVSSGGGGSGGGGSGGGGSDIELTQSPSSLAVSAGEKVTMSCKSSQSLLNSRTRKNQLAWYQQKPGQSPELLIYWASTRQSGVPDRFTGSGSGTDFTLTISSVQAEDLAVYYCQQSYNLLTFGPGTKLEVKRTTTPAPRPPTPAPTIASQPLSLRPEACRPAAGGAVHTRGLDFACDIYIWAPLAGTCGVLLLSLVITLYCKRGRKKLLYIFKQPFMRPVQTTQEEDGCSCRFPEEEEGGCELRVKFSRSADAPAYQQGQNQLYNELNLGRREEYDVLDKRRGRDPEMGGKPRRKNPQEGLYNELQKDKMAEAYSEIGMKGERRRGKGHDGLYQGLSTATKDTYDALHMQALPPR

SEQ ID NO: 233 - protein, 472 aa, Artificial Sequence
  Synthetic construct
VKLQESGGGFVKPGGSLKVSCAASGFTFSSYAMSWVRLSPEMRLEWVATISSAGGYIFYSDSVQGRFTISRDNAKNTLHLQMGSLRSGDTAMYYCARQGFGNYGDYYAMDYWGQGTTVTVSSGGGGSGGGGSGGGGSDIELTQSPSSLAVSAGEKVTMSCKSSQSLLNSRTRKNQLAWYQQKPGQSPELLIYWASTRQSGVPDRFTGSGSGTDFTLTISSVQAEDLAVYYCQQSYNLLTFGPGTKLEVKRAAAIEVMYPPPYLDNEKSNGTIIHVKGKHLCPSPLFPGPSKPFWVLVVVGGVLACYSLLVTVAFIIFWVRSKRSRLLHSDYMNMTPRRPGPTRKHYQPYAPPRDFAAYRSRVKFSRSADAPAYQQGQNQLYNELNLGRREEYDVLDKRRGRDPEMGGKPRRKNPQEGLYNELQKDKMAEAYSEIGMKGERRRGKGHDGLYQGLSTATKDTYDALHMQALPPR

SEQ ID NO: 234 - protein, 249 aa, Artificial Sequence
  Synthetic construct
VKLEESGGGFVKPGGSLKISCAASGFTFRNYAMSWVRLSPEMRLEWVATISSAGGYIFYSDSVQGRFTISRDNAKNTHLQMGSLRSGDTAMYYCARQGFGNYGDYYAMDYWGQGTTVTVSSGGGGSGGGGSGGGGSDIELTQSPSSLAVSAGEKVTMSCKSSQSLLNSRTRKNQLAWYQQKTGQSPELLIYWASTRQSGVPDRFTGSGSGTDFTLTISSVQAEDLAVYYCQQSYNLLTFGPGTKLEIKR

SEQ ID NO: 235 - protein, 472 aa, Artificial Sequence
  Synthetic construct
VKLEESGGGFVKPGGSLKISCAASGFTFRNYAMSWVRLSPEMRLEWVATISSAGGYIFYSDSVQGRFTISRDNAKNTHLQMGSLRSGDTAMYYCARQGFGNYGDYYAMDYWGQGTTVTVSSGGGGSGGGGSGGGGSDIELTQSPSSLAVSAGEKVTMSCKSSQSLLNSRTRKNQLAWYQQKTGQSPELLIYWASTRQSGVPDRFTGSGSGTDFTLTISSVQAEDLAVYYCQQSYNLLTFGPGTKLEIKRTTTPAPRPPTPAPTIASQPLSLRPEACRPAAGGAVHTRGLDFACDIYIWAPLAGTCGVLLLSLVITLYCKRGRKKLLYIFKQPFMRPVQTTQEEDGCSCRFPEEEEGGCELRVKFSRSADAPAYQQGQNQLYNELNLGRREEYDVLDKRRGRDPEMGGKPRRKNPQEGLYNELQKDKMAEAYSEIGMKGERRRGKGHDGLYQGLSTATKDTYDALHMQALPPR

SEQ ID NO: 236 - protein, 471 aa, Artificial Sequence
  Synthetic construct
VKLEESGGGFVKPGGSLKISCAASGFTFRNYAMSWVRLSPEMRLEWVATISSAGGYIFYSDSVQGRFTISRDNAKNTHLQMGSLRSGDTAMYYCARQGFGNYGDYYAMDYWGQGTTVTVSSGGGGSGGGGSGGGGSDIELTQSPSSLAVSAGEKVTMSCKSSQSLLNSRTRKNQLAWYQQKTGQSPELLIYWASTRQSGVPDRFTGSGSGTDFTLTISSVQAEDLAVYYCQQSYNLLTFGPGTKLEIKRAAAIEVMYPPPYLDNEKSNGTIIHVKGKHLCPSPLFPGPSKPFWVLVVVGGVLACYSLLVTVAFIIFWVRSKRSRLLHSDYMNMTPRRPGPTRKHYQPYAPPRDFAAYRSRVKFSRSADAPAYQQGQNQLYNELNLGRREEYDVLDKRRGRDPEMGGKPRRKNPQEGLYNELQKDKMAEAYSEIGMKGERRRGKGHDGLYQGLSTATKDTYDALHMQALPPR

SEQ ID NO: 237 - protein, 238 aa, Artificial Sequence
  Synthetic construct
DIQMTQSSSFLSVSLGGRVTITCKASDLIHNWLAWYQQKPGNAPRLLISGATSLETGVPSRFSGSGSGNDYTLSIASLQTEDAATYYCQQYWTTPFTFGSGTKLEIKGGGGSGGGGSGGGGSDVQLQESGPGLVNPSQSLSLTCTVTGYSITNDYAWNWIRQFPGNKLEWMGYINYSGYTTYNPSLKSRISITRDTSKNQFFLHLNSVTTEDTATYYCARWDGGLTYWGQGTLVTVSA

SEQ ID NO: 238 - protein, 461 aa, Artificial Sequence
  Synthetic construct
DIQMTQSSSFLSVSLGGRVTITCKASDLIHNWLAWYQQKPGNAPRLLISGATSLETGVPSRFSGSGSGNDYTLSIASLQTEDAATYYCQQYWTTPFTFGSGTKLEIKGGGGSGGGGSGGGGSDVQLQESGPGLVNPSQSLSLTCTVTGYSITNDYAWNWIRQFPGNKLEWMGYINYSGYTTYNPSLKSRISITRDTSKNQFFLHLNSVTTEDTATYYCARWDGGLTYWGQGTLVTVSATTTPAPRPPTPAPTIASQPLSLRPEACRPAAGGAVHTRGLDFACDIYIWAPLAGTCGVLLLSLVITLYCKRGRKKLLYIFKQPFMRPVQTTQEEDGCSCRFPEEEEGGCELRVKFSRSADAPAYQQGQNQLYNELNLGRREEYDVLDKRRGRDPEMGGKPRRKNPQEGLYNELQKDKMAEAYSEIGMKGERRRGKGHDGLYQGLSTATKDTYDALHMQALPPR

SEQ ID NO: 239 - protein, 460 aa, Artificial Sequence
  Synthetic construct
DIQMTQSSSFLSVSLGGRVTITCKASDLIHNWLAWYQQKPGNAPRLLISGATSLETGVPSRFSGSGSGNDYTLSIASLQTEDAATYYCQQYWTTPFTFGSGTKLEIKGGGGSGGGGSGGGGSDVQLQESGPGLVNPSQSLSLTCTVTGYSITNDYAWNWIRQFPGNKLEWMGYINYSGYTTYNPSLKSRISITRDTSKNQFFLHLNSVTTEDTATYYCARWDGGLTYWGQGTLVTVSAAAAIEVMYPPPYLDNEKSNGTIIHVKGKHLCPSPLFPGPSKPFWVLVVVGGVLACYSLLVTVAFIIFWVRSKRSRLLHSDYMNMTPRRPGPTRKHYQPYAPPRDFAAYRSRVKFSRSADAPAYQQGQNQLYNELNLGRREEYDVLDKRRGRDPEMGGKPRRKNPQEGLYNELQKDKMAEAYSEIGMKGERRRGKGHDGLYQGLSTATKDTYDALHMQALPPR

SEQ ID NO: 240 - protein, 244 aa, Artificial Sequence
  Synthetic construct
DIVLTQSPAIMSASLGERVTMTCTASSSVSSSYLHWYQQKPGSSPKLWIYSTSNLASGVPGRFSGSGSGTSYSLTISSMEAEDAATYYCHQYHRSPYTFGGGTKVEIKRGGGGSGGGGSGGGGSEVQLQQSGAELVKPGASVKLSCTASGFNIKDTYMHWVKQRPEQGLEWIGRVDPANGNTKYDPKFQGKATLTADTSSNTAYLQLSSLTSEDTAVYFCVRDYYGHTYGFAFCDQGTTLTVSA

SEQ ID NO: 241 - protein, 467 aa, Artificial Sequence
  Synthetic construct
DIVLTQSPAIMSASLGERVTMTCTASSSVSSSYLHWYQQKPGSSPKLWIYSTSNLASGVPGRFSGSGSGTSYSLTISSMEAEDAATYYCHQYHRSPYTFGGGTKVEIKRGGGGSGGGGSGGGGSEVQLQQSGAELVKPGASVKLSCTASGFNIKDTYMHWVKQRPEQGLEWIGRVDPANGNTKYDPKFQGKATLTADTSSNTAYLQLSSLTSEDTAVYFCVRDYYGHTYGFAFCDQGTTLTVSATTTPAPRPPTPAPTIASQPLSLRPEACRPAAGGAVHTRGLDFACDIYIWAPLAGTCGVLLLSLVITLYCKRGRKKLLYIFKQPFMRPVQTTQEEDGCSCRFPEEEEGGCELRVKFSRSADAPAYQQGQNQLYNELNLGRREEYDVLDKRRGRDPEMGGKPRRKNPQEGLYNELQKDKMAEAYSEIGMKGERRRGKGHDGLYQGLSTATKDTYDALHMQALPPR

SEQ ID NO: 242 - protein, 466 aa, Artificial Sequence
  Synthetic construct
DIVLTQSPAIMSASLGERVTMTCTASSSVSSSYLHWYQQKPGSSPKLWIYSTSNLASGVPGRFSGSGSGTSYSLTISSMEAEDAATYYCHQYHRSPYTFGGGTKVEIKRGGGGSGGGGSGGGGSEVQLQQSGAELVKPGASVKLSCTASGFNIKDTYMHWVKQRPEQGLEWIGRVDPANGNTKYDPKFQGKATLTADTSSNTAYLQLSSLTSEDTAVYFCVRDYYGHTYGFAFCDQGTTLTVSAAAAIEVMYPPPYLDNEKSNGTIIHVKGKHLCPSPLFPGPSKPFWVLVVVGGVLACYSLLVTVAFIIFWVRSKRSRLLHSDYMNMTPRRPGPTRKHYQPYAPPRDFAAYRSRVKFSRSADAPAYQQGQNQLYNELNLGRREEYDVLDKRRGRDPEMGGKPRRKNPQEGLYNELQKDKMAEAYSEIGMKGERRRGKGHDGLYQGLSTATKDTYDALHMQALPPR

SEQ ID NO: 243 - protein, 275 aa, Homo sapiens
MPRPGTMALCLLTLVLSLLPPQAAASVVVEHDVLLRTKYTPEYKTVLDNATEVVKEKITKVTTQQIMINDICSDMMCFNTTGTQVQNITVTQYDPEEDCRKMAKEYGDYFVVEYRDQKPYCISPCEPGFSVSKNCNLGKCQMSLSGPQCLCVTTETHWYSGETCNQGTQKSLVYGLVGAGVVLMLIILVALLMLVFRSKREVKRQKYRLSQLYKWQEEDSGPAPGTFQNIGFDICQDDDSIHLESIYSNFQPSLRHIDPETKIRIQRPQVMTTSF

SEQ ID NO: 244 - protein, 240 aa, Artificial Sequence
  Synthetic construct
QVQLVESGGGVVKPGRSLRLSCAASGFTFSSYGMHWVRQAPGKCLEWVAVIWFDASNKYYAESVKGRFTISRDNSKNTLYLQMNNLRAEDTAVYYCARGAYTYGFDYWGQGTLVTVSSGGGGSGGGGSGGGGSEIVLTQSPGTLSLSPGERATLSCRASQSINRYLAWYQQKPGQAPRLLIYTASNRATGIPDRFSGSGSGTDFTLTISRLEPEDFAVYYCHHYGSSIFTFGCGTKVEIK

SEQ ID NO: 245 - protein, 463 aa, Artificial Sequence
  Synthetic construct
QVQLVESGGGVVKPGRSLRLSCAASGFTFSSYGMHWVRQAPGKCLEWVAVIWFDASNKYYAESVKGRFTISRDNSKNTLYLQMNNLRAEDTAVYYCARGAYTYGFDYWGQGTLVTVSSGGGGSGGGGSGGGGSEIVLTQSPGTLSLSPGERATLSCRASQSINRYLAWYQQKPGQAPRLLIYTASNRATGIPDRFSGSGSGTDFTLTISRLEPEDFAVYYCHHYGSSIFTFGCGTKVEIKTTTPAPRPPTPAPTIASQPLSLRPEACRPAAGGAVHTRGLDFACDIYIWAPLAGTCGVLLLSLVITLYCKRGRKKLLYIFKQPFMRPVQTTQEEDGCSCRFPEEEEGGCELRVKFSRSADAPAYQQGQNQLYNELNLGRREEYDVLDKRRGRDPEMGGKPRRKNPQEGLYNELQKDKMAEAYSEIGMKGERRRGKGHDGLYQGLSTATKDTYDALHMQALPPR

SEQ ID NO: 246 - protein, 462 aa, Artificial Sequence
  Synthetic construct
QVQLVESGGGVVKPGRSLRLSCAASGFTFSSYGMHWVRQAPGKCLEWVAVIWFDASNKYYAESVKGRFTISRDNSKNTLYLQMNNLRAEDTAVYYCARGAYTYGFDYWGQGTLVTVSSGGGGSGGGGSGGGGSEIVLTQSPGTLSLSPGERATLSCRASQSINRYLAWYQQKPGQAPRLLIYTASNRATGIPDRFSGSGSGTDFTLTISRLEPEDFAVYYCHHYGSSIFTFGCGTKVEIKAAAIEVMYPPPYLDNEKSNGTIIHVKGKHLCPSPLFPGPSKPFWVLVVVGGVLACYSLLVTVAFIIFWVRSKRSRLLHSDYMNMTPRRPGPTRKHYQPYAPPRDFAAYRSRVKFSRSADAPAYQQGQNQLYNELNLGRREEYDVLDKRRGRDPEMGGKPRRKNPQEGLYNELQKDKMAEAYSEIGMKGERRRGKGHDGLYQGLSTATKDTYDALHMQALPPR

SEQ ID NO: 247 - protein, 240 aa, Artificial Sequence
  Synthetic construct
QVQLVESGGGVVQPGGSLRLSCAASGFTFSSYGMHWVRQAPGKCLEWVAVIWYTGSNKYYAHSVKGRFAISRDNSKNTLYLQMNNLRAEDTAVYYCARGAYTYGFDYWGQGTLVTVSSGGGGSGGGGSGGGGSEIVLTQSPGTLSLSPGERATLSCRASQSINRYLAWYQQKPGQAPRLLIYTASNRATGIPDRFSGSGSGTDFTLTISRLEPEDFAVYYCHHYGSSIFTFGCGTKVEIK

SEQ ID NO: 248 - protein, 463 aa, Artificial Sequence
  Synthetic construct
QVQLVESGGGVVQPGGSLRLSCAASGFTFSSYGMHWVRQAPGKCLEWVAVIWYTGSNKYYAHSVKGRFAISRDNSKNTLYLQMNNLRAEDTAVYYCARGAYTYGFDYWGQGTLVTVSSGGGGSGGGGSGGGGSEIVLTQSPGTLSLSPGERATLSCRASQSINRYLAWYQQKPGQAPRLLIYTASNRATGIPDRFSGSGSGTDFTLTISRLEPEDFAVYYCHHYGSSIFTFGCGTKVEIKTTTPAPRPPTPAPTIASQPLSLRPEACRPAAGGAVHTRGLDFACDIYIWAPLAGTCGVLLLSLVITLYCKRGRKKLLYIFKQPFMRPVQTTQEEDGCSCRFPEEEEGGCELRVKFSRSADAPAYQQGQNQLYNELNLGRREEYDVLDKRRGRDPEMGGKPRRKNPQEGLYNELQKDKMAEAYSEIGMKGERRRGKGHDGLYQGLSTATKDTYDALHMQALPPR

SEQ ID NO: 249 - protein, 462 aa, Artificial Sequence
  Synthetic construct
QVQLVESGGGVVQPGGSLRLSCAASGFTFSSYGMHWVRQAPGKCLEWVAVIWYTGSNKYYAHSVKGRFAISRDNSKNTLYLQMNNLRAEDTAVYYCARGAYTYGFDYWGQGTLVTVSSGGGGSGGGGSGGGGSEIVLTQSPGTLSLSPGERATLSCRASQSINRYLAWYQQKPGQAPRLLIYTASNRATGIPDRFSGSGSGTDFTLTISRLEPEDFAVYYCHHYGSSIFTFGCGTKVEIKAAAIEVMYPPPYLDNEKSNGTIIHVKGKHLCPSPLFPGPSKPFWVLVVVGGVLACYSLLVTVAFIIFWVRSKRSRLLHSDYMNMTPRRPGPTRKHYQPYAPPRDFAAYRSRVKFSRSADAPAYQQGQNQLYNELNLGRREEYDVLDKRRGRDPEMGGKPRRKNPQEGLYNELQKDKMAEAYSEIGMKGERRRGKGHDGLYQGLSTATKDTYDALHMQALPPR

SEQ ID NO: 250 - protein, 238 aa, Artificial Sequence
  Synthetic construct
QVQLQQSGAELVRPGSSAKISCKASGYEFSSHWMNWVKQRPGQGLEWIGQIYPGDGDINYNGKFKGKATLTADKSSSTVYMQLSSLTSEDSAVYFCARHYNYAMDYWGQGTSVTVSSGGGGSGGGGSGGGGSQIVLTQSPAIMSASPGEKVTISCSASSSVSYMCWYQQKPGSSPKPWIYRTSNLASGVPARFSGSGSGTSYSLTISSMEAEDAATYYCQQFHSYPRTFGGGTKLEIK

SEQ ID NO: 251 - protein, 461 aa, Artificial Sequence
  Synthetic construct
QVQLQQSGAELVRPGSSAKISCKASGYEFSSHWMNWVKQRPGQGLEWIGQIYPGDGDINYNGKFKGKATLTADKSSSTVYMQLSSLTSEDSAVYFCARHYNYAMDYWGQGTSVTVSSGGGGSGGGGSGGGGSQIVLTQSPAIMSASPGEKVTISCSASSSVSYMCWYQQKPGSSPKPWIYRTSNLASGVPARFSGSGSGTSYSLTISSMEAEDAATYYCQQFHSYPRTFGGGTKLEIKTTTPAPRPPTPAPTIASQPLSLRPEACRPAAGGAVHTRGLDFACDIYIWAPLAGTCGVLLLSLVITLYCKRGRKKLLYIFKQPFMRPVQTTQEEDGCSCRFPEEEEGGCELRVKFSRSADAPAYQQGQNQLYNELNLGRREEYDVLDKRRGRDPEMGGKPRRKNPQEGLYNELQKDKMAEAYSEIGMKGERRRGKGHDGLYQGLSTATKDTYDALHMQALPPR

SEQ ID NO: 252 - protein, 460 aa, Artificial Sequence
  Synthetic construct
QVQLQQSGAELVRPGSSAKISCKASGYEFSSHWMNWVKQRPGQGLEWIGQIYPGDGDINYNGKFKGKATLTADKSSSTVYMQLSSLTSEDSAVYFCARHYNYAMDYWGQGTSVTVSSGGGGSGGGGSGGGGSQIVLTQSPAIMSASPGEKVTISCSASSSVSYMCWYQQKPGSSPKPWIYRTSNLASGVPARFSGSGSGTSYSLTISSMEAEDAATYYCQQFHSYPRTFGGGTKLEIKAAAIEVMYPPPYLDNEKSNGTIIHVKGKHLCPSPLFPGPSKPFWVLVVVGGVLACYSLLVTVAFIIFWVRSKRSRLLHSDYMNMTPRRPGPTRKHYQPYAPPRDFAAYRSRVKFSRSADAPAYQQGQNQLYNELNLGRREEYDVLDKRRGRDPEMGGKPRRKNPQEGLYNELQKDKMAEAYSEIGMKGERRRGKGHDGLYQGLSTATKDTYDALHMQALPPR

SEQ ID NO: 253 - protein, 243 aa, Artificial Sequence
  Synthetic construct
QVQLQQPGAELVRPGASVKLSCKASGYTFTTYWMNWVKQRPEQGLEWIGRIDPYDSETHYNQKFKDKAILTVDKSSSTAYMQLSSLTSEDSAVYYCARGPYYGTNPWFPYWGQGTLVTVSSGGGGSGGGGSGGGGSDVQITQSPSYLAASPGETITINCRASKSISKYLAWYQEKPGKTNKLLIYSGSTLQSGIPSRFSGSGSGTDFTLTISSLEPEDFAMYYCQQHHEYPYTFGGGTKLEIK

SEQ ID NO: 254 - protein, 466 aa, Artificial Sequence
  Synthetic construct
QVQLQQPGAELVRPGASVKLSCKASGYTFTTYWMNWVKQRPEQGLEWIGRIDPYDSETHYNQKFKDKAILTVDKSSSTAYMQLSSLTSEDSAVYYCARGPYYGTNPWFPYWGQGTLVTVSSGGGGSGGGGSGGGGSDVQITQSPSYLAASPGETITINCRASKSISKYLAWYQEKPGKTNKLLIYSGSTLQSGIPSRFSGSGSGTDFTLTISSLEPEDFAMYYCQQHHEYPYTFGGGTKLEIKTTTPAPRPPTPAPTIASQPLSLRPEACRPAAGGAVHTRGLDFACDIYIWAPLAGTCGVLLLSLVITLYCKRGRKKLLYIFKQPFMRPVQTTQEEDGCSCRFPEEEEGGCELRVKFSRSADAPAYQQGQNQLYNELNLGRREEYDVLDKRRGRDPEMGGKPRRKNPQEGLYNELQKDKMAEAYSEIGMKGERRRGKGHDGLYQGLSTATKDTYDALHMQALPPR

SEQ ID NO: 255 - protein, 465 aa, Artificial Sequence
  Synthetic construct
QVQLQQPGAELVRPGASVKLSCKASGYTFTTYWMNWVKQRPEQGLEWIGRIDPYDSETHYNQKFKDKAILTVDKSSSTAYMQLSSLTSEDSAVYYCARGPYYGTNPWFPYWGQGTLVTVSSGGGGSGGGGSGGGGSDVQITQSPSYLAASPGETITINCRASKSISKYLAWYQEKPGKTNKLLIYSGSTLQSGIPSRFSGSGSGTDFTLTISSLEPEDFAMYYCQQHHEYPYTFGGGTKLEIKAAAIEVMYPPPYLDNEKSNGTIIHVKGKHLCPSPLFPGPSKPFWVLVVVGGVLACYSLLVTVAFIIFWVRSKRSRLLHSDYMNMTPRRPGPTRKHYQPYAPPRDFAAYRSRVKFSRSADAPAYQQGQNQLYNELNLGRREEYDVLDKRRGRDPEMGGKPRRKNPQEGLYNELQKDKMAEAYSEIGMKGERRRGKGHDGLYQGLSTATKDTYDALHMQALPPR

SEQ ID NO: 256 - protein, 247 aa, Artificial Sequence
  Synthetic construct
QVQLVESGGALVQPGGSLTLSCKASGFDFSAYYMSWVRQAPGKGLEWIATIYPSSGKTYYAASVQGRFTISADNAKNTVYLQMNSLTAADTATYFCARDSYADDGALFNIWGQGTLVTVSSGGGGSGGGGSGGGGSQLVLTQSPSVSAALGSSAKITCTLSSAHKTDTIDWYQQLAGQAPRYLMYVQSDGSYEKRSGVPDRFSGSSSGADRYLIISSVQADDEADYYCGADYIGGYVFGGGTQLTVG

SEQ ID NO: 257 - protein, 470 aa, Artificial Sequence
  Synthetic construct
QVQLVESGGALVQPGGSLTLSCKASGFDFSAYYMSWVRQAPGKGLEWIATIYPSSGKTYYAASVQGRFTISADNAKNTVYLQMNSLTAADTATYFCARDSYADDGALFNIWGQGTLVTVSSGGGGSGGGGSGGGGSQLVLTQSPSVSAALGSSAKITCTLSSAHKTDTIDWYQQLAGQAPRYLMYVQSDGSYEKRSGVPDRFSGSSSGADRYLIISSVQADDEADYYCGADYIGGYVFGGGTQLTVGTTTPAPRPPTPAPTIASQPLSLRPEACRPAAGGAVHTRGLDFACDIYIWAPLAGTCGVLLLSLVITLYCKRGRKKLLYIFKQPFMRPVQTTQEEDGCSCRFPEEEEGGCELRVKFSRSADAPAYQQGQNQLYNELNLGRREEYDVLDKRRGRDPEMGGKPRRKNPQEGLYNELQKDKMAEAYSEIGMKGERRRGKGHDGLYQGLSTATKDTYDALHMQALPPR

SEQ ID NO: 258 - protein, 469 aa, Artificial Sequence
  Synthetic construct
QVQLVESGGALVQPGGSLTLSCKASGFDFSAYYMSWVRQAPGKGLEWIATIYPSSGKTYYAASVQGRFTISADNAKNTVYLQMNSLTAADTATYFCARDSYADDGALFNIWGQGTLVTVSSGGGGSGGGGSGGGGSQLVLTQSPSVSAALGSSAKITCTLSSAHKTDTIDWYQQLAGQAPRYLMYVQSDGSYEKRSGVPDRFSGSSSGADRYLIISSVQADDEADYYCGADYIGGYVFGGGTQLTVGAAAIEVMYPPPYLDNEKSNGTIIHVKGKHLCPSPLFPGPSKPFWVLVVVGGVLACYSLLVTVAFIIFWVRSKRSRLLHSDYMNMTPRRPGPTRKHYQPYAPPRDFAAYRSRVKFSRSADAPAYQQGQNQLYNELNLGRREEYDVLDKRRGRDPEMGGKPRRKNPQEGLYNELQKDKMAEAYSEIGMKGERRRGKGHDGLYQGLSTATKDTYDALHMQALPPR

SEQ ID NO: 259 - protein, 240 aa, Artificial Sequence
  Synthetic construct
QVQLQQSGAELVRPGASVTLSCKASGYTFSDYEMHWVIQTPVHGLEWIGAIDPETGGTAYNQKFKGKAILTADKSSSTAYMELRSLTSEDSAVYYCTGYYDYDSFTYWGQGTLVTVSAGGGGSGGGGSGGGGSDIVMTQSQKIMSTTVGDRVSITCKASQNVDAAVAWYQQKPGQSPKLLIYSASNRYTGVPDRFTGSGSGTDFTLTISNMQSEDLADYFCQQYDIYPYTFGGGTKLEIK

SEQ ID NO: 260 - protein, 463 aa, Artificial Sequence
  Synthetic construct
QVQLQQSGAELVRPGASVTLSCKASGYTFSDYEMHWVIQTPVHGLEWIGAIDPETGGTAYNQKFKGKAILTADKSSSTAYMELRSLTSEDSAVYYCTGYYDYDSFTYWGQGTLVTVSAGGGGSGGGGSGGGGSDIVMTQSQKIMSTTVGDRVSITCKASQNVDAAVAWYQQKPGQSPKLLIYSASNRYTGVPDRFTGSGSGTDFTLTISNMQSEDLADYFCQQYDIYPYTFGGGTKLEIKTTTPAPRPPTPAPTIASQPLSLRPEACRPAAGGAVHTRGLDFACDIYIWAPLAGTCGVLLLSLVITLYCKRGRKKLLYIFKQPFMRPVQTTQEEDGCSCRFPEEEEGGCELRVKFSRSADAPAYQQGQNQLYNELNLGRREEYDVLDKRRGRDPEMGGKPRRKNPQEGLYNELQKDKMAEAYSEIGMKGERRRGKGHDGLYQGLSTATKDTYDALHMQALPPR

SEQ ID NO: 261 - protein, 462 aa, Artificial Sequence
  Synthetic construct
QVQLQQSGAELVRPGASVTLSCKASGYTFSDYEMHWVIQTPVHGLEWIGAIDPETGGTAYNQKFKGKAILTADKSSSTAYMELRSLTSEDSAVYYCTGYYDYDSFTYWGQGTLVTVSAGGGGSGGGGSGGGGSDIVMTQSQKIMSTTVGDRVSITCKASQNVDAAVAWYQQKPGQSPKLLIYSASNRYTGVPDRFTGSGSGTDFTLTISNMQSEDLADYFCQQYDIYPYTFGGGTKLEIKAAAIEVMYPPPYLDNEKSNGTIIHVKGKHLCPSPLFPGPSKPFWVLVVVGGVLACYSLLVTVAFIIFWVRSKRSRLLHSDYMNMTPRRPGPTRKHYQPYAPPRDFAAYRSRVKFSRSADAPAYQQGQNQLYNELNLGRREEYDVLDKRRGRDPEMGGKPRRKNPQEGLYNELQKDKMAEAYSEIGMKGERRRGKGHDGLYQGLSTATKDTYDALHMQALPPR

SEQ ID NO: 262 - protein, 241 aa, Artificial Sequence
  Synthetic construct
ELVMTQTPSSTSGAVGGTVTINCQASQSIDSNLAWFQQKPGQPPTLLIYRASNLASGVPSRFSGSRSGTEYTLTISGVQREDAATYYCLGGVGNVSYRTSFGGGTEVVVKGGGGSGGGGSGGGGSQSVKESEGDLVTPAGNLTLTCTASGSDINDYPISWVRQAPGKGLEWIGFINSGGSTWYASWVKGRFTISRTSTTVDLKMTSLTTDDTATYFCARGYSTYYGDFNIWGPGTLVTISS

SEQ ID NO: 263 - protein, 464 aa, Artificial Sequence
  Synthetic construct
ELVMTQTPSSTSGAVGGTVTINCQASQSIDSNLAWFQQKPGQPPTLLIYRASNLASGVPSRFSGSRSGTEYTLTISGVQREDAATYYCLGGVGNVSYRTSFGGGTEVVVKGGGGSGGGGSGGGGSQSVKESEGDLVTPAGNLTLTCTASGSDINDYPISWVRQAPGKGLEWIGFINSGGSTWYASWVKGRFTISRTSTTVDLKMTSLTTDDTATYFCARGYSTYYGDFNIWGPGTLVTISSTTTPAPRPPTPAPTIASQPLSLRPEACRPAAGGAVHTRGLDFACDIYIWAPLAGTCGVLLLSLVITLYCKRGRKKLLYIFKQPFMRPVQTTQEEDGCSCRFPEEEEGGCELRVKFSRSADAPAYQQGQNQLYNELNLGRREEYDVLDKRRGRDPEMGGKPRRKNPQEGLYNELQKDKMAEAYSEIGMKGERRRGKGHDGLYQGLSTATKDTYDALHMQALPPR

SEQ ID NO: 264 - protein, 463 aa, Artificial Sequence
  Synthetic construct
ELVMTQTPSSTSGAVGGTVTINCQASQSIDSNLAWFQQKPGQPPTLLIYRASNLASGVPSRFSGSRSGTEYTLTISGVQREDAATYYCLGGVGNVSYRTSFGGGTEVVVKGGGGSGGGGSGGGGSQSVKESEGDLVTPAGNLTLTCTASGSDINDYPISWVRQAPGKGLEWIGFINSGGSTWYASWVKGRFTISRTSTTVDLKMTSLTTDDTATYFCARGYSTYYGDFNIWGPGTLVTISSAAAIEVMYPPPYLDNEKSNGTIIHVKGKHLCPSPLFPGPSKPFWVLVVVGGVLACYSLLVTVAFIIFWVRSKRSRLLHSDYMNMTPRRPGPTRKHYQPYAPPRDFAAYRSRVKFSRSADAPAYQQGQNQLYNELNLGRREEYDVLDKRRGRDPEMGGKPRRKNPQEGLYNELQKDKMAEAYSEIGMKGERRRGKGHDGLYQGLSTATKDTYDALHMQALPPR

SEQ ID NO: 265 - protein, 248 aa, Artificial Sequence
  Synthetic construct
ELVLTQSPSVSAALGSPAKITCTLSSAHKTDTIDWYQQLQGEAPRYLMQVQSDGSYTKRPGVPDRFSGSSSGADRYLIIPSVQADDEADYYCGADYIGGYVFGGGTQLTVTGGGGGSGGGGSGGGGSQEQLVESGGRLVTPGGSLTLSCKASGFDFSAYYMSWVRQAPGKGLEWIATIYPSSGKTYYATWVNGRFTISSDNAQNTVDLQMNSLTAADRATYFCARDSYADDGALFNIWGPGTLVTISS

SEQ ID NO: 266 - protein, 471 aa, Artificial Sequence
  Synthetic construct
ELVLTQSPSVSAALGSPAKITCTLSSAHKTDTIDWYQQLQGEAPRYLMQVQSDGSYTKRPGVPDRFSGSSSGADRYLIIPSVQADDEADYYCGADYIGGYVFGGGTQLTVTGGGGGSGGGGSGGGGSQEQLVESGGRLVTPGGSLTLSCKASGFDFSAYYMSWVRQAPGKGLEWIATIYPSSGKTYYATWVNGRFTISSDNAQNTVDLQMNSLTAADRATYFCARDSYADDGALFNIWGPGTLVTISSTTTPAPRPPTPAPTIASQPLSLRPEACRPAAGGAVHTRGLDFACDIYIWAPLAGTCGVLLLSLVITLYCKRGRKKLLYIFKQPFMRPVQTTQEEDGCSCRFPEEEEGGCELRVKFSRSADAPAYQQGQNQLYNELNLGRREEYDVLDKRRGRDPEMGGKPRRKNPQEGLYNELQKDKMAEAYSEIGMKGERRRGKGHDGLYQGLSTATKDTYDALHMQALPPR

SEQ ID NO: 267 - protein, 470 aa, Artificial Sequence
  Synthetic construct
ELVLTQSPSVSAALGSPAKITCTLSSAHKTDTIDWYQQLQGEAPRYLMQVQSDGSYTKRPGVPDRFSGSSSGADRYLIIPSVQADDEADYYCGADYIGGYVFGGGTQLTVTGGGGGSGGGGSGGGGSQEQLVESGGRLVTPGGSLTLSCKASGFDFSAYYMSWVRQAPGKGLEWIATIYPSSGKTYYATWVNGRFTISSDNAQNTVDLQMNSLTAADRATYFCARDSYADDGALFNIWGPGTLVTISSAAAIEVMYPPPYLDNEKSNGTIIHVKGKHLCPSPLFPGPSKPFWVLVVVGGVLACYSLLVTVAFIIFWVRSKRSRLLHSDYMNMTPRRPGPTRKHYQPYAPPRDFAAYRSRVKFSRSADAPAYQQGQNQLYNELNLGRREEYDVLDKRRGRDPEMGGKPRRKNPQEGLYNELQKDKMAEAYSEIGMKGERRRGKGHDGLYQGLSTATKDTYDALHMQALPPR

SEQ ID NO: 268 - protein, 250 aa, Artificial Sequence
  Synthetic construct
DIVMTQTPLSLPVTPGEPASISCRASKSISKYLAWYQQKPGQAPRLLIYSGSTLQSGIPPRFSGSGYGTDFTLTINNIESEDAAYYFCQQHDESPYTFGEGTKVEIKGGGGSGSTSGSGKPGSGEGSTKGGGGGSQVQLQESGPGLVKPSQTLSLTCTVSGYAFTAYNIHWVRQAPGQGLEWMGSFDPYDGGSSYNQKFKDRLTISKDTSKNQWLTMTNMDPVDTATYYCARGWYYFDYWGHGTLVTVSS

SEQ ID NO: 269 - protein, 473 aa, Artificial Sequence
  Synthetic construct
DIVMTQTPLSLPVTPGEPASISCRASKSISKYLAWYQQKPGQAPRLLIYSGSTLQSGIPPRFSGSGYGTDFTLTINNIESEDAAYYFCQQHDESPYTFGEGTKVEIKGGGGSGSTSGSGKPGSGEGSTKGGGGGSQVQLQESGPGLVKPSQTLSLTCTVSGYAFTAYNIHWVRQAPGQGLEWMGSFDPYDGGSSYNQKFKDRLTISKDTSKNQWLTMTNMDPVDTATYYCARGWYYFDYWGHGTLVTVSSTTTPAPRPPTPAPTIASQPLSLRPEACRPAAGGAVHTRGLDFACDIYIWAPLAGTCGVLLLSLVITLYCKRGRKKLLYIFKQPFMRPVQTTQEEDGCSCRFPEEEEGGCELRVKFSRSADAPAYQQGQNQLYNELNLGRREEYDVLDKRRGRDPEMGGKPRRKNPQEGLYNELQKDKMAEAYSEIGMKGERRRGKGHDGLYQGLSTATKDTYDALHMQALPPR

SEQ ID NO: 270 - protein, 472 aa, Artificial Sequence
  Synthetic construct
DIVMTQTPLSLPVTPGEPASISCRASKSISKYLAWYQQKPGQAPRLLIYSGSTLQSGIPPRFSGSGYGTDFTLTINNIESEDAAYYFCQQHDESPYTFGEGTKVEIKGGGGSGSTSGSGKPGSGEGSTKGGGGGSQVQLQESGPGLVKPSQTLSLTCTVSGYAFTAYNIHWVRQAPGQGLEWMGSFDPYDGGSSYNQKFKDRLTISKDTSKNQWLTMTNMDPVDTATYYCARGWYYFDYWGHGTLVTVSSAAAIEVMYPPPYLDNEKSNGTIIHVKGKHLCPSPLFPGPSKPFWVLVVVGGVLACYSLLVTVAFIIFWVRSKRSRLLHSDYMNMTPRRPGPTRKHYQPYAPPRDFAAYRSRVKFSRSADAPAYQQGQNQLYNELNLGRREEYDVLDKRRGRDPEMGGKPRRKNPQEGLYNELQKDKMAEAYSEIGMKGERRRGKGHDGLYQGLSTATKDTYDALHMQALPPR

SEQ ID NO: 271 - protein, 116 aa, Artificial Sequence
  Synthetic construct
QVQLQESGGGLVQTGGSLRLSCTASGSIFDIVRGSWYRQAPGNQRELVAIITSGGATNYADSVAGRFTISRDSAWKALYLQMNSLKPEDTAVYFCNMESVRYRNYWGQGTQVTVSS

SEQ ID NO: 272 - protein, 339 aa, Artificial Sequence
  Synthetic construct
QVQLQESGGGLVQTGGSLRLSCTASGSIFDIVRGSWYRQAPGNQRELVAIITSGGATNYADSVAGRFTISRDSAWKALYLQMNSLKPEDTAVYFCNMESVRYRNYWGQGTQVTVSSTTTPAPRPPTPAPTIASQPLSLRPEACRPAAGGAVHTRGLDFACDIYIWAPLAGTCGVLLLSLVITLYCKRGRKKLLYIFKQPFMRPVQTTQEEDGCSCRFPEEEEGGCELRVKFSRSADAPAYQQGQNQLYNELNLGRREEYDVLDKRRGRDPEMGGKPRRKNPQEGLYNELQKDKMAEAYSEIGMKGERRRGKGHDGLYQGLSTATKDTYDALHMQALPPR

SEQ ID NO: 273 - protein, 338 aa, Artificial Sequence
  Synthetic construct
QVQLQESGGGLVQTGGSLRLSCTASGSIFDIVRGSWYRQAPGNQRELVAIITSGGATNYADSVAGRFTISRDSAWKALYLQMNSLKPEDTAVYFCNMESVRYRNYWGQGTQVTVSSAAAIEVMYPPPYLDNEKSNGTIIHVKGKHLCPSPLFPGPSKPFWVLVVVGGVLACYSLLVTVAFIIFWVRSKRSRLLHSDYMNMTPRRPGPTRKHYQPYAPPRDFAAYRSRVKFSRSADAPAYQQGQNQLYNELNLGRREEYDVLDKRRGRDPEMGGKPRRKNPQEGLYNELQKDKMAEAYSEIGMKGERRRGKGHDGLYQGLSTATKDTYDALHMQALPPR

SEQ ID NO: 274 - protein, 126 aa, Artificial Sequence
  Synthetic construct
QVQLQESGGGLVQPGGSLRLSCAASGFTLEHYSIGWFRQAPGKDLEGVSCITSSGGIPKYADSVKGRFIISRDNAKNTGYLQMNSLKPEDTAVYYCGAATPDDDCSVPGHYGLNYWGKGTQVTVSS

SEQ ID NO: 275 - protein, 349 aa, Artificial Sequence
  Synthetic construct
QVQLQESGGGLVQPGGSLRLSCAASGFTLEHYSIGWFRQAPGKDLEGVSCITSSGGIPKYADSVKGRFIISRDNAKNTGYLQMNSLKPEDTAVYYCGAATPDDDCSVPGHYGLNYWGKGTQVTVSSTTTPAPRPPTPAPTIASQPLSLRPEACRPAAGGAVHTRGLDFACDIYIWAPLAGTCGVLLLSLVITLYCKRGRKKLLYIFKQPFMRPVQTTQEEDGCSCRFPEEEEGGCELRVKFSRSADAPAYQQGQNQLYNELNLGRREEYDVLDKRRGRDPEMGGKPRRKNPQEGLYNELQKDKMAEAYSEIGMKGERRRGKGHDGLYQGLSTATKDTYDALHMQALPPR

SEQ ID NO: 276 - protein, 348 aa, Artificial Sequence
  Synthetic construct
QVQLQESGGGLVQPGGSLRLSCAASGFTLEHYSIGWFRQAPGKDLEGVSCITSSGGIPKYADSVKGRFIISRDNAKNTGYLQMNSLKPEDTAVYYCGAATPDDDCSVPGHYGLNYWGKGTQVTVSSAAAIEVMYPPPYLDNEKSNGTIIHVKGKHLCPSPLFPGPSKPFWVLVVVGGVLACYSLLVTVAFIIFWVRSKRSRLLHSDYMNMTPRRPGPTRKHYQPYAPPRDFAAYRSRVKFSRSADAPAYQQGQNQLYNELNLGRREEYDVLDKRRGRDPEMGGKPRRKNPQEGLYNELQKDKMAEAYSEIGMKGERRRGKGHDGLYQGLSTATKDTYDALHMQALPPR

SEQ ID NO: 277 - protein, 121 aa, Artificial Sequence
  Synthetic construct
QVQLQESGGGLVQAGGSLRLSCAAPGFTFDAYAIGWFRQAPGKEREGVICLSPSDGSTYYADSVKGRFTISSDNAKNTVYLQMNSLKPEDTAVYYCATPSWCSLKADFGSWGQGTQVTVSS

SEQ ID NO: 278 - protein, 344 aa, Artificial Sequence
  Synthetic construct
QVQLQESGGGLVQAGGSLRLSCAAPGFTFDAYAIGWFRQAPGKEREGVICLSPSDGSTYYADSVKGRFTISSDNAKNTVYLQMNSLKPEDTAVYYCATPSWCSLKADFGSWGQGTQVTVSSTTTPAPRPPTPAPTIASQPLSLRPEACRPAAGGAVHTRGLDFACDIYIWAPLAGTCGVLLLSLVITLYCKRGRKKLLYIFKQPFMRPVQTTQEEDGCSCRFPEEEEGGCELRVKFSRSADAPAYQQGQNQLYNELNLGRREEYDVLDKRRGRDPEMGGKPRRKNPQEGLYNELQKDKMAEAYSEIGMKGERRRGKGHDGLYQGLSTATKDTYDALHMQALPPR

SEQ ID NO: 279 - protein, 343 aa, Artificial Sequence
  Synthetic construct
QVQLQESGGGLVQAGGSLRLSCAAPGFTFDAYAIGWFRQAPGKEREGVICLSPSDGSTYYADSVKGRFTISSDNAKNTVYLQMNSLKPEDTAVYYCATPSWCSLKADFGSWGQGTQVTVSSAAAIEVMYPPPYLDNEKSNGTIIHVKGKHLCPSPLFPGPSKPFWVLVVVGGVLACYSLLVTVAFIIFWVRSKRSRLLHSDYMNMTPRRPGPTRKHYQPYAPPRDFAAYRSRVKFSRSADAPAYQQGQNQLYNELNLGRREEYDVLDKRRGRDPEMGGKPRRKNPQEGLYNELQKDKMAEAYSEIGMKGERRRGKGHDGLYQGLSTATKDTYDALHMQALPPR

SEQ ID NO: 280 - protein, 116 aa, Artificial Sequence
  Synthetic construct
QVQLQESGGGLVQPGGSLRLSCTASGSIFSATRMEWYRQAPGKQRELVAIVTSGGRTNYADSVNGRFTISRDNAKNTLYLQMNNLKPEDTAVYYCKFERYDYVNYWGRGTQVTVSS

SEQ ID NO: 281 - protein, 339 aa, Artificial Sequence
  Synthetic construct
QVQLQESGGGLVQPGGSLRLSCTASGSIFSATRMEWYRQAPGKQRELVAIVTSGGRTNYADSVNGRFTISRDNAKNTLYLQMNNLKPEDTAVYYCKFERYDYVNYWGRGTQVTVSSTTTPAPRPPTPAPTIASQPLSLRPEACRPAAGGAVHTRGLDFACDIYIWAPLAGTCGVLLLSLVITLYCKRGRKKLLYIFKQPFMRPVQTTQEEDGCSCRFPEEEEGGCELRVKFSRSADAPAYQQGQNQLYNELNLGRREEYDVLDKRRGRDPEMGGKPRRKNPQEGLYNELQKDKMAEAYSEIGMKGERRRGKGHDGLYQGLSTATKDTYDALHMQALPPR

SEQ ID NO: 282 - protein, 338 aa, Artificial Sequence
  Synthetic construct
QVQLQESGGGLVQPGGSLRLSCTASGSIFSATRMEWYRQAPGKQRELVAIVTSGGRTNYADSVNGRFTISRDNAKNTLYLQMNNLKPEDTAVYYCKFERYDYVNYWGRGTQVTVSSAAAIEVMYPPPYLDNEKSNGTIIHVKGKHLCPSPLFPGPSKPFWVLVVVGGVLACYSLLVTVAFIIFWVRSKRSRLLHSDYMNMTPRRPGPTRKHYQPYAPPRDFAAYRSRVKFSRSADAPAYQQGQNQLYNELNLGRREEYDVLDKRRGRDPEMGGKPRRKNPQEGLYNELQKDKMAEAYSEIGMKGERRRGKGHDGLYQGLSTATKDTYDALHMQALPPR

SEQ ID NO: 283 - protein, 116 aa, Artificial Sequence
  Synthetic construct
QVQLQESGGGLVQPGGSLRLSCVASGSIFSIARMNWYRQAPGKQRELVAILNRAGRTDYADSVKGRFTISSDNAKTTVYLQMNSLKPEDTALYYCNLQTISYHDFWGQGTQVTVSS

SEQ ID NO: 284 - protein, 339 aa, Artificial Sequence
  Synthetic construct
QVQLQESGGGLVQPGGSLRLSCVASGSIFSIARMNWYRQAPGKQRELVAILNRAGRTDYADSVKGRFTISSDNAKTTVYLQMNSLKPEDTALYYCNLQTISYHDFWGQGTQVTVSSTTTPAPRPPTPAPTIASQPLSLRPEACRPAAGGAVHTRGLDFACDIYIWAPLAGTCGVLLLSLVITLYCKRGRKKLLYIFKQPFMRPVQTTQEEDGCSCRFPEEEEGGCELRVKFSRSADAPAYQQGQNQLYNELNLGRREEYDVLDKRRGRDPEMGGKPRRKNPQEGLYNELQKDKMAEAYSEIGMKGERRRGKGHDGLYQGLSTATKDTYDALHMQALPPR

SEQ ID NO: 285 - protein, 338 aa, Artificial Sequence
  Synthetic construct
QVQLQESGGGLVQPGGSLRLSCVASGSIFSIARMNWYRQAPGKQRELVAILNRAGRTDYADSVKGRFTISSDNAKTTVYLQMNSLKPEDTALYYCNLQTISYHDFWGQGTQVTVSSAAAIEVMYPPPYLDNEKSNGTIIHVKGKHLCPSPLFPGPSKPFWVLVVVGGVLACYSLLVTVAFIIFWVRSKRSRLLHSDYMNMTPRRPGPTRKHYQPYAPPRDFAAYRSRVKFSRSADAPAYQQGQNQLYNELNLGRREEYDVLDKRRGRDPEMGGKPRRKNPQEGLYNELQKDKMAEAYSEIGMKGERRRGKGHDGLYQGLSTATKDTYDALHMQALPPR

SEQ ID NO: 286 - protein, 116 aa, Artificial Sequence
  Synthetic construct
QVQLQESGGGLVQTGGSLRLSCTASGSIFDIARGNWYRQAPGKQRELVAIITSGGATNYADSVAGRFTISRDDAKNTVYLQMNGLKPEDTAVYFCNMESLSYRHYWGQGTQVTVSS

SEQ ID NO: 287 - protein, 339 aa, Artificial Sequence
  Synthetic construct
QVQLQESGGGLVQTGGSLRLSCTASGSIFDIARGNWYRQAPGKQRELVAIITSGGATNYADSVAGRFTISRDDAKNTVYLQMNGLKPEDTAVYFCNMESLSYRHYWGQGTQVTVSSTTTPAPRPPTPAPTIASQPLSLRPEACRPAAGGAVHTRGLDFACDIYIWAPLAGTCGVLLLSLVITLYCKRGRKKLLYIFKQPFMRPVQTTQEEDGCSCRFPEEEEGGCELRVKFSRSADAPAYQQGQNQLYNELNLGRREEYDVLDKRRGRDPEMGGKPRRKNPQEGLYNELQKDKMAEAYSEIGMKGERRRGKGHDGLYQGLSTATKDTYDALHMQALPPR

SEQ ID NO: 288 - protein, 338 aa, Artificial Sequence
  Synthetic construct
QVQLQESGGGLVQTGGSLRLSCTASGSIFDIARGNWYRQAPGKQRELVAIITSGGATNYADSVAGRFTISRDDAKNTVYLQMNGLKPEDTAVYFCNMESLSYRHYWGQGTQVTVSSAAAIEVMYPPPYLDNEKSNGTIIHVKGKHLCPSPLFPGPSKPFWVLVVVGGVLACYSLLVTVAFIIFWVRSKRSRLLHSDYMNMTPRRPGPTRKHYQPYAPPRDFAAYRSRVKFSRSADAPAYQQGQNQLYNELNLGRREEYDVLDKRRGRDPEMGGKPRRKNPQEGLYNELQKDKMAEAYSEIGMKGERRRGKGHDGLYQGLSTATKDTYDALHMQALPPR

SEQ ID NO: 289 - protein, 113 aa, Artificial Sequence
  Synthetic construct
QVQLQESGGGLVQAGGSLRLSCAASKSIIRDNVMAWHRQAPGKQRELVAIINTGGSANVDDSVKGRFTISRDNAKNMVYLQMNNLKPEDTAVYYCNVYYRDLWGQGTQVTVSS

SEQ ID NO: 290 - protein, 336 aa, Artificial Sequence
  Synthetic construct
QVQLQESGGGLVQAGGSLRLSCAASKSIIRDNVMAWHRQAPGKQRELVAIINTGGSANVDDSVKGRFTISRDNAKNMVYLQMNNLKPEDTAVYYCNVYYRDLWGQGTQVTVSSTTTPAPRPPTPAPTIASQPLSLRPEACRPAAGGAVHTRGLDFACDIYIWAPLAGTCGVLLLSLVITLYCKRGRKKLLYIFKQPFMRPVQTTQEEDGCSCRFPEEEEGGCELRVKFSRSADAPAYQQGQNQLYNELNLGRREEYDVLDKRRGRDPEMGGKPRRKNPQEGLYNELQKDKMAEAYSEIGMKGERRRGKGHDGLYQGLSTATKDTYDALHMQALPPR

SEQ ID NO: 291 - protein, 335 aa, Artificial Sequence
  Synthetic construct
QVQLQESGGGLVQAGGSLRLSCAASKSIIRDNVMAWHRQAPGKQRELVAIINTGGSANVDDSVKGRFTISRDNAKNMVYLQMNNLKPEDTAVYYCNVYYRDLWGQGTQVTVSSAAAIEVMYPPPYLDNEKSNGTIIHVKGKHLCPSPLFPGPSKPFWVLVVVGGVLACYSLLVTVAFIIFWVRSKRSRLLHSDYMNMTPRRPGPTRKHYQPYAPPRDFAAYRSRVKFSRSADAPAYQQGQNQLYNELNLGRREEYDVLDKRRGRDPEMGGKPRRKNPQEGLYNELQKDKMAEAYSEIGMKGERRRGKGHDGLYQGLSTATKDTYDALHMQALPPR

SEQ ID NO: 292 - protein, 126 aa, Artificial Sequence
  Synthetic construct
QVQLQESGGGLVQPGGSLRLSCVASGFTLDRYAVGWFRQAPGKELEGVSCISSSGDIIKYADSAKGRFTIARDNAKNTAYLQMNSLKPEDTAVYYCTAADPKDDCSVPGYYGLNYWGKGTQVTVSS

SEQ ID NO: 293 - protein, 349 aa, Artificial Sequence
  Synthetic construct
QVQLQESGGGLVQPGGSLRLSCVASGFTLDRYAVGWFRQAPGKELEGVSCISSSGDIIKYADSAKGRFTIARDNAKNTAYLQMNSLKPEDTAVYYCTAADPKDDCSVPGYYGLNYWGKGTQVTVSSTTTPAPRPPTPAPTIASQPLSLRPEACRPAAGGAVHTRGLDFACDIYIWAPLAGTCGVLLLSLVITLYCKRGRKKLLYIFKQPFMRPVQTTQEEDGCSCRFPEEEEGGCELRVKFSRSADAPAYQQGQNQLYNELNLGRREEYDVLDKRRGRDPEMGGKPRRKNPQEGLYNELQKDKMAEAYSEIGMKGERRRGKGHDGLYQGLSTATKDTYDALHMQALPPR

SEQ ID NO: 294 - protein, 348 aa, Artificial Sequence
  Synthetic construct
QVQLQESGGGLVQPGGSLRLSCVASGFTLDRYAVGWFRQAPGKELEGVSCISSSGDIIKYADSAKGRFTIARDNAKNTAYLQMNSLKPEDTAVYYCTAADPKDDCSVPGYYGLNYWGKGTQVTVSSAAAIEVMYPPPYLDNEKSNGTIIHVKGKHLCPSPLFPGPSKPFWVLVVVGGVLACYSLLVTVAFIIFWVRSKRSRLLHSDYMNMTPRRPGPTRKHYQPYAPPRDFAAYRSRVKFSRSADAPAYQQGQNQLYNELNLGRREEYDVLDKRRGRDPEMGGKPRRKNPQEGLYNELQKDKMAEAYSEIGMKGERRRGKGHDGLYQGLSTATKDTYDALHMQALPPR

SEQ ID NO: 295 - protein, 126 aa, Artificial Sequence
  Synthetic construct
QVQLQESGGGLVQPGGSLRLSCVASGFTLDKYAIGWFRQAPGKELEGVSCITSSSGVVKYADSVKGRFIISRDNTNNRAFLQMSSLKPEDTAVYYCAAAGPPDDCSVPGYYGLNYWGKGTQVTVSS

SEQ ID NO: 296 - protein, 349 aa, Artificial Sequence
  Synthetic construct
QVQLQESGGGLVQPGGSLRLSCVASGFTLDKYAIGWFRQAPGKELEGVSCITSSSGVVKYADSVKGRFIISRDNTNNRAFLQMSSLKPEDTAVYYCAAAGPPDDCSVPGYYGLNYWGKGTQVTVSSTTTPAPRPPTPAPTIASQPLSLRPEACRPAAGGAVHTRGLDFACDIYIWAPLAGTCGVLLLSLVITLYCKRGRKKLLYIFKQPFMRPVQTTQEEDGCSCRFPEEEEGGCELRVKFSRSADAPAYQQGQNQLYNELNLGRREEYDVLDKRRGRDPEMGGKPRRKNPQEGLYNELQKDKMAEAYSEIGMKGERRRGKGHDGLYQGLSTATKDTYDALHMQALPPR

SEQ ID NO: 297 - protein, 348 aa, Artificial Sequence
  Synthetic construct
QVQLQESGGGLVQPGGSLRLSCVASGFTLDKYAIGWFRQAPGKELEGVSCITSSSGVVKYADSVKGRFIISRDNTNNRAFLQMSSLKPEDTAVYYCAAAGPPDDCSVPGYYGLNYWGKGTQVTVSSAAAIEVMYPPPYLDNEKSNGTIIHVKGKHLCPSPLFPGPSKPFWVLVVVGGVLACYSLLVTVAFIIFWVRSKRSRLLHSDYMNMTPRRPGPTRKHYQPYAPPRDFAAYRSRVKFSRSADAPAYQQGQNQLYNELNLGRREEYDVLDKRRGRDPEMGGKPRRKNPQEGLYNELQKDKMAEAYSEIGMKGERRRGKGHDGLYQGLSTATKDTYDALHMQALPPR

SEQ ID NO: 298 - protein, 247 aa, Artificial Sequence
  Synthetic construct
DIVMTQSPDSLAVSLGERATINCRSSQSLLNAGNRKNYLTWYQQKPGQPPKLLIYWASTRESGVPDRFSGSGSGTDFTLTISSLQAEDVAVYYCQNAYSYPFTFGGGTKLEIKGGGGSGGGGSGGGGSEVQLVESGGGLVQPGGSLRLSCAASGFTFSTFGMHWVRQAPGKGLEWVSYITSGESPIYFTDTVKGRFTISRDNAKNSLYLQMNSLRAEDTAVYYCARSSYYGNSMDYWGQGTLVTVSS

SEQ ID NO: 299 - protein, 470 aa, Artificial Sequence
  Synthetic construct
DIVMTQSPDSLAVSLGERATINCRSSQSLLNAGNRKNYLTWYQQKPGQPPKLLIYWASTRESGVPDRFSGSGSGTDFTLTISSLQAEDVAVYYCQNAYSYPFTFGGGTKLEIKGGGGSGGGGSGGGGSEVQLVESGGGLVQPGGSLRLSCAASGFTFSTFGMHWVRQAPGKGLEWVSYITSGESPIYFTDTVKGRFTISRDNAKNSLYLQMNSLRAEDTAVYYCARSSYYGNSMDYWGQGTLVTVSSTTTPAPRPPTPAPTIASQPLSLRPEACRPAAGGAVHTRGLDFACDIYIWAPLAGTCGVLLLSLVITLYCKRGRKKLLYIFKQPFMRPVQTTQEEDGCSCRFPEEEEGGCELRVKFSRSADAPAYQQGQNQLYNELNLGRREEYDVLDKRRGRDPEMGGKPRRKNPQEGLYNELQKDKMAEAYSEIGMKGERRRGKGHDGLYQGLSTATKDTYDALHMQALPPR

SEQ ID NO: 300 - protein, 469 aa, Artificial Sequence
  Synthetic construct
DIVMTQSPDSLAVSLGERATINCRSSQSLLNAGNRKNYLTWYQQKPGQPPKLLIYWASTRESGVPDRFSGSGSGTDFTLTISSLQAEDVAVYYCQNAYSYPFTFGGGTKLEIKGGGGSGGGGSGGGGSEVQLVESGGGLVQPGGSLRLSCAASGFTFSTFGMHWVRQAPGKGLEWVSYITSGESPIYFTDTVKGRFTISRDNAKNSLYLQMNSLRAEDTAVYYCARSSYYGNSMDYWGQGTLVTVSSAAAIEVMYPPPYLDNEKSNGTIIHVKGKHLCPSPLFPGPSKPFWVLVVVGGVLACYSLLVTVAFIIFWVRSKRSRLLHSDYMNMTPRRPGPTRKHYQPYAPPRDFAAYRSRVKFSRSADAPAYQQGQNQLYNELNLGRREEYDVLDKRRGRDPEMGGKPRRKNPQEGLYNELQKDKMAEAYSEIGMKGERRRGKGHDGLYQGLSTATKDTYDALHMQALPPR

SEQ ID NO: 301 - protein, 248 aa, Artificial Sequence
  Synthetic construct
DIVMTQSPDSLAVSLGERATINCKSSQSLLNAGNQKNYLTWYQQKPGQPPKLLIYRASSRESGVPDRFSGSGSGTDFTLTISSLQAEDVAVYYCQNDYIYPYTFGGGTKLEIKGGGGSGGGGSGGGGSQVQLVQSGAEVKKPGASVKVSCKASGYTFTTYPIEWVRQAPGQRLEWMGNFHPYNDDTKYNEKFKGRVTITRDTSASTAYMELSSLRSEDTAVYYCARRAYGYPYAMDYWGQGTLVTVSS

SEQ ID NO: 302 - protein, 471 aa, Artificial Sequence
  Synthetic construct
DIVMTQSPDSLAVSLGERATINCKSSQSLLNAGNQKNYLTWYQQKPGQPPKLLIYRASSRESGVPDRFSGSGSGTDFTLTISSLQAEDVAVYYCQNDYIYPYTFGGGTKLEIKGGGGSGGGGSGGGGSQVQLVQSGAEVKKPGASVKVSCKASGYTFTTYPIEWVRQAPGQRLEWMGNFHPYNDDTKYNEKFKGRVTITRDTSASTAYMELSSLRSEDTAVYYCARRAYGYPYAMDYWGQGTLVTVSSTTTPAPRPPTPAPTIASQPLSLRPEACRPAAGGAVHTRGLDFACDIYIWAPLAGTCGVLLLSLVITLYCKRGRKKLLYIFKQPFMRPVQTTQEEDGCSCRFPEEEEGGCELRVKFSRSADAPAYQQGQNQLYNELNLGRREEYDVLDKRRGRDPEMGGKPRRKNPQEGLYNELQKDKMAEAYSEIGMKGERRRGKGHDGLYQGLSTATKDTYDALHMQALPPR

SEQ ID NO: 303 - protein, 470 aa, Artificial Sequence
  Synthetic construct
DIVMTQSPDSLAVSLGERATINCKSSQSLLNAGNQKNYLTWYQQKPGQPPKLLIYRASSRESGVPDRFSGSGSGTDFTLTISSLQAEDVAVYYCQNDYIYPYTFGGGTKLEIKGGGGSGGGGSGGGGSQVQLVQSGAEVKKPGASVKVSCKASGYTFTTYPIEWVRQAPGQRLEWMGNFHPYNDDTKYNEKFKGRVTITRDTSASTAYMELSSLRSEDTAVYYCARRAYGYPYAMDYWGQGTLVTVSSAAAIEVMYPPPYLDNEKSNGTIIHVKGKHLCPSPLFPGPSKPFWVLVVVGGVLACYSLLVTVAFIIFWVRSKRSRLLHSDYMNMTPRRPGPTRKHYQPYAPPRDFAAYRSRVKFSRSADAPAYQQGQNQLYNELNLGRREEYDVLDKRRGRDPEMGGKPRRKNPQEGLYNELQKDKMAEAYSEIGMKGERRRGKGHDGLYQGLSTATKDTYDALHMQALPPR

SEQ ID NO: 304 - protein, 246 aa, Artificial Sequence
  Synthetic construct
DIVMTQSPDSLAYSLGERATINCKSSQSLFNSGNQKNYLTWYQQKPGQPPKLLIYWASTRESGVPDRFSGSGSGTDIFITISSLQAEDVAVYYCQNAYSFPYTFGGGTKLEIKGGGGSGGGGSGGGGSQVQLQESGPGLIKPSQTLSLTCTVSGGSISSGYNWHWIRQPPGKGLEWIGYIHYTGSTNYNPALRSRVTISVDTSKNQFSLKLSSVTAADTAIYYCARIYNGNSFPYWGQGTTVTVSS

SEQ ID NO: 305 - protein, 469 aa, Artificial Sequence
  Synthetic construct
DIVMTQSPDSLAYSLGERATINCKSSQSLFNSGNQKNYLTWYQQKPGQPPKLLIYWASTRESGVPDRFSGSGSGTDIFITISSLQAEDVAVYYCQNAYSFPYTFGGGTKLEIKGGGGSGGGGSGGGGSQVQLQESGPGLIKPSQTLSLTCTVSGGSISSGYNWHWIRQPPGKGLEWIGYIHYTGSTNYNPALRSRVTISVDTSKNQFSLKLSSVTAADTAIYYCARIYNGNSFPYWGQGTTVTVSSTTTPAPRPPTPAPTIASQPLSLRPEACRPAAGGAVHTRGLDFACDIYIWAPLAGTCGVLLLSLVITLYCKRGRKKLLYIFKQPFMRPVQTTQEEDGCSCRFPEEEEGGCELRVKFSRSADAPAYQQGQNQLYNELNLGRREEYDVLDKRRGRDPEMGGKPRRKNPQEGLYNELQKDKMAEAYSEIGMKGERRRGKGHDGLYQGLSTATKDTYDALHMQALPPR

SEQ ID NO: 306 - protein, 468 aa, Artificial Sequence
  Synthetic construct
DIVMTQSPDSLAYSLGERATINCKSSQSLFNSGNQKNYLTWYQQKPGQPPKLLIYWASTRESGVPDRFSGSGSGTDIFITISSLQAEDVAVYYCQNAYSFPYTFGGGTKLEIKGGGGSGGGGSGGGGSQVQLQESGPGLIKPSQTLSLTCTVSGGSISSGYNWHWIRQPPGKGLEWIGYIHYTGSTNYNPALRSRVTISVDTSKNQFSLKLSSVTAADTAIYYCARIYNGNSFPYWGQGTTVTVSSAAAIEVMYPPPYLDNEKSNGTIIHVKGKHLCPSPLFPGPSKPFWVLVVVGGVLACYSLLVTVAFIIFWVRSKRSRLLHSDYMNMTPRRPGPTRKHYQPYAPPRDFAAYRSRVKFSRSADAPAYQQGQNQLYNELNLGRREEYDVLDKRRGRDPEMGGKPRRKNPQEGLYNELQKDKMAEAYSEIGMKGERRRGKGHDGLYQGLSTATKDTYDALHMQALPPR

SEQ ID NO: 307 - protein, 246 aa, Artificial Sequence
  Synthetic construct
DIVMTQSPDSLAVSLGERATISCKSSQSLLNSGNQKNYLTWYQQKPGQPPKLLIYWASTRESGVPDRFSGSGSGTDFTLTISSLQAEDVAVYYCQNDYFYPFTFGQGTKLEIKGGGGSGGGGSGGGGSQVQLVQSGAEVKKPGSSVKVSCKASGYAFSNYLIEWVKQAPGQGLEWIGLINPGSGGTNYNEKFKGKATITADKSTSTAYMELSSLRSEDTAVYYCARVYYGNSFAYWGQGTLVTVSS

SEQ ID NO: 308 - protein, 469 aa, Artificial Sequence
  Synthetic construct
DIVMTQSPDSLAVSLGERATISCKSSQSLLNSGNQKNYLTWYQQKPGQPPKLLIYWASTRESGVPDRFSGSGSGTDFTLTISSLQAEDVAVYYCQNDYFYPFTFGQGTKLEIKGGGGSGGGGSGGGGSQVQLVQSGAEVKKPGSSVKVSCKASGYAFSNYLIEWVKQAPGQGLEWIGLINPGSGGTNYNEKFKGKATITADKSTSTAYMELSSLRSEDTAVYYCARVYYGNSFAYWGQGTLVTVSSTTTPAPRPPTPAPTIASQPLSLRPEACRPAAGGAVHTRGLDFACDIYIWAPLAGTCGVLLLSLVITLYCKRGRKKLLYIFKQPFMRPVQTTQEEDGCSCRFPEEEEGGCELRVKFSRSADAPAYQQGQNQLYNELNLGRREEYDVLDKRRGRDPEMGGKPRRKNPQEGLYNELQKDKMAEAYSEIGMKGERRRGKGHDGLYQGLSTATKDTYDALHMQALPPR

SEQ ID NO: 309 - protein, 468 aa, Artificial Sequence
  Synthetic construct
DIVMTQSPDSLAVSLGERATISCKSSQSLLNSGNQKNYLTWYQQKPGQPPKLLIYWASTRESGVPDRFSGSGSGTDFTLTISSLQAEDVAVYYCQNDYFYPFTFGQGTKLEIKGGGGSGGGGSGGGGSQVQLVQSGAEVKKPGSSVKVSCKASGYAFSNYLIEWVKQAPGQGLEWIGLINPGSGGTNYNEKFKGKATITADKSTSTAYMELSSLRSEDTAVYYCARVYYGNSFAYWGQGTLVTVSSAAAIEVMYPPPYLDNEKSNGTIIHVKGKHLCPSPLFPGPSKPFWVLVVVGGVLACYSLLVTVAFIIFWVRSKRSRLLHSDYMNMTPRRPGPTRKHYQPYAPPRDFAAYRSRVKFSRSADAPAYQQGQNQLYNELNLGRREEYDVLDKRRGRDPEMGGKPRRKNPQEGLYNELQKDKMAEAYSEIGMKGERRRGKGHDGLYQGLSTATKDTYDALHMQALPPR

SEQ ID NO: 310 - protein, 246 aa, Artificial Sequence; identical to SEQ ID NO: 46
  Synthetic construct

SEQ ID NO: 311 - protein, 469 aa, Artificial Sequence; identical to SEQ ID NO: 47
  Synthetic construct

SEQ ID NO: 312 - protein, 468 aa, Artificial Sequence; identical to SEQ ID NO: 48
  Synthetic construct

SEQ ID NO: 313 - protein, 246 aa, Artificial Sequence
  Synthetic construct
DIVMTQSPDSLAVSLGERVTMNCKSSQSLLNSGNQKNYLSWYQQKPGQPPKLLFYWASTRESGVPDRFSGSGSGTDFTLTISSVQAEDVAVYYCQNDYSYPFTFGQGTKLEIKGGGGSGGGGSGGGGSEVQLLESGGGLVQPGGSLRLSCAASGFTFSSYTMSWVRQAPGKGLEWVATIIIGGSYTYYADSVKGRFTISRDNSKNTLYLQMNSLRAEDTAVYYCTRLVKGNAMDYWGQGTLVTVSS

SEQ ID NO: 314 - protein, 469 aa, Artificial Sequence
  Synthetic construct
DIVMTQSPDSLAVSLGERVTMNCKSSQSLLNSGNQKNYLSWYQQKPGQPPKLLFYWASTRESGVPDRFSGSGSGTDFTLTISSVQAEDVAVYYCQNDYSYPFTFGQGTKLEIKGGGGSGGGGSGGGGSEVQLLESGGGLVQPGGSLRLSCAASGFTFSSYTMSWVRQAPGKGLEWVATIIIGGSYTYYADSVKGRFTISRDNSKNTLYLQMNSLRAEDTAVYYCTRLVKGNAMDYWGQGTLVTVSSTTTPAPRPPTPAPTIASQPLSLRPEACRPAAGGAVHTRGLDFACDIYIWAPLAGTCGVLLLSLVITLYCKRGRKKLLYIFKQPFMRPVQTTQEEDGCSCRFPEEEEGGCELRVKFSRSADAPAYQQGQNQLYNELNLGRREEYDVLDKRRGRDPEMGGKPRRKNPQEGLYNELQKDKMAEAYSEIGMKGERRRGKGHDGLYQGLSTATKDTYDALHMQALPPR

SEQ ID NO: 315 - protein, 468 aa, Artificial Sequence
  Synthetic construct
DIVMTQSPDSLAVSLGERVTMNCKSSQSLLNSGNQKNYLSWYQQKPGQPPKLLFYWASTRESGVPDRFSGSGSGTDFTLTISSVQAEDVAVYYCQNDYSYPFTFGQGTKLEIKGGGGSGGGGSGGGGSEVQLLESGGGLVQPGGSLRLSCAASGFTFSSYTMSWVRQAPGKGLEWVATIIIGGSYTYYADSVKGRFTISRDNSKNTLYLQMNSLRAEDTAVYYCTRLVKGNAMDYWGQGTLVTVSSAAAIEVMYPPPYLDNEKSNGTIIHVKGKHLCPSPLFPGPSKPFWVLVVVGGVLACYSLLVTVAFIIFWVRSKRSRLLHSDYMNMTPRRPGPTRKHYQPYAPPRDFAAYRSRVKFSRSADAPAYQQGQNQLYNELNLGRREEYDVLDKRRGRDPEMGGKPRRKNPQEGLYNELQKDKMAEAYSEIGMKGERRRGKGHDGLYQGLSTATKDTYDALHMQALPPR

SEQ ID NO: 316 - protein, 238 aa, Artificial Sequence
  Synthetic construct
QIVLTQSPAIMSASPGEKVTITCSASSSVSYMHWFQQKPGTSPKLWIYSTSNLASGVPARFSGSGSGTSYSLTISRMEAEDAATYYCQQRSSYPPTFGGGTKLEIKGGGGSGGGGSGGGGSQVQLQQSGAELMKPGASVKISCKATGYTFSSYWIEWVKQRPGHGLEWIGEILPGSGSTNYNEKFKGKATFTADTSSNTAYMQLSSLTSEDSAVYYCARYDYPWFAYWGQGTLVTVSA

SEQ ID NO: 317 - protein, 461 aa, Artificial Sequence
  Synthetic construct
QIVLTQSPAIMSASPGEKVTITCSASSSVSYMHWFQQKPGTSPKLWIYSTSNLASGVPARFSGSGSGTSYSLTISRMEAEDAATYYCQQRSSYPPTFGGGTKLEIKGGGGSGGGGSGGGGSQVQLQQSGAELMKPGASVKISCKATGYTFSSYWIEWVKQRPGHGLEWIGEILPGSGSTNYNEKFKGKATFTADTSSNTAYMQLSSLTSEDSAVYYCARYDYPWFAYWGQGTLVTVSATTTPAPRPPTPAPTIASQPLSLRPEACRPAAGGAVHTRGLDFACDIYIWAPLAGTCGVLLLSLVITLYCKRGRKKLLYIFKQPFMRPVQTTQEEDGCSCRFPEEEEGGCELRVKFSRSADAPAYQQGQNQLYNELNLGRREEYDVLDKRRGRDPEMGGKPRRKNPQEGLYNELQKDKMAEAYSEIGMKGERRRGKGHDGLYQGLSTATKDTYDALHMQALPPR

SEQ ID NO: 318 - protein, 460 aa, Artificial Sequence
  Synthetic construct
QIVLTQSPAIMSASPGEKVTITCSASSSVSYMHWFQQKPGTSPKLWIYSTSNLASGVPARFSGSGSGTSYSLTISRMEAEDAATYYCQQRSSYPPTFGGGTKLEIKGGGGSGGGGSGGGGSQVQLQQSGAELMKPGASVKISCKATGYTFSSYWIEWVKQRPGHGLEWIGEILPGSGSTNYNEKFKGKATFTADTSSNTAYMQLSSLTSEDSAVYYCARYDYPWFAYWGQGTLVTVSAAAAIEVMYPPPYLDNEKSNGTIIHVKGKHLCPSPLFPGPSKPFWVLVVVGGVLACYSLLVTVAFIIFWVRSKRSRLLHSDYMNMTPRRPGPTRKHYQPYAPPRDFAAYRSRVKFSRSADAPAYQQGQNQLYNELNLGRREEYDVLDKRRGRDPEMGGKPRRKNPQEGLYNELQKDKMAEAYSEIGMKGERRRGKGHDGLYQGLSTATKDTYDALHMQALPPR

SEQ ID NO: 319 - protein, 243 aa, Artificial Sequence
  Synthetic construct
QIVLTQSPALMSASPGEKVTMTCTASSSVSYMYWYQQKPRSSPKPWIFLTSNLASGVPARFSGRGSGTSFSLTISSMEAEDAATYYCQQWSGYPPITFGSGTKLEIKGGGGSGGGGSGGGGSQVQLQQPGAELVKPGASVKLSCKASGYTITSYSLHWVKQRPGQGLEWIGEINPANGDHNFSEKFEIKATLTVDSSSNTAFMQLSRLTSEDSAVYYCTRLDDSRFHWYFDVWGAGTTVTVSS

SEQ ID NO: 320 - protein, 466 aa, Artificial Sequence
  Synthetic construct
QIVLTQSPALMSASPGEKVTMTCTASSSVSYMYWYQQKPRSSPKPWIFLTSNLASGVPARFSGRGSGTSFSLTISSMEAEDAATYYCQQWSGYPPITFGSGTKLEIKGGGGSGGGGSGGGGSQVQLQQPGAELVKPGASVKLSCKASGYTITSYSLHWVKQRPGQGLEWIGEINPANGDHNFSEKFEIKATLTVDSSSNTAFMQLSRLTSEDSAVYYCTRLDDSRFHWYFDVWGAGTTVTVSSTTTPAPRPPTPAPTIASQPLSLRPEACRPAAGGAVHTRGLDFACDIYIWAPLAGTCGVLLLSLVITLYCKRGRKKLLYIFKQPFMRPVQTTQEEDGCSCRFPEEEEGGCELRVKFSRSADAPAYQQGQNQLYNELNLGRREEYDVLDKRRGRDPEMGGKPRRKNPQEGLYNELQKDKMAEAYSEIGMKGERRRGKGHDGLYQGLSTATKDTYDALHMQALPPR

SEQ ID NO: 321 - protein, 465 aa, Artificial Sequence
  Synthetic construct
QIVLTQSPALMSASPGEKVTMTCTASSSVSYMYWYQQKPRSSPKPWIFLTSNLASGVPARFSGRGSGTSFSLTISSMEAEDAATYYCQQWSGYPPITFGSGTKLEIKGGGGSGGGGSGGGGSQVQLQQPGAELVKPGASVKLSCKASGYTITSYSLHWVKQRPGQGLEWIGEINPANGDHNFSEKFEIKATLTVDSSSNTAFMQLSRLTSEDSAVYYCTRLDDSRFHWYFDVWGAGTTVTVSSAAAIEVMYPPPYLDNEKSNGTIIHVKGKHLCPSPLFPGPSKPFWVLVVVGGVLACYSLLVTVAFIIFWVRSKRSRLLHSDYMNMTPRRPGPTRKHYQPYAPPRDFAAYRSRVKFSRSADAPAYQQGQNQLYNELNLGRREEYDVLDKRRGRDPEMGGKPRRKNPQEGLYNELQKDKMAEAYSEIGMKGERRRGKGHDGLYQGLSTATKDTYDALHMQALPPR

SEQ ID NO: 322 - protein, 239 aa, Artificial Sequence
  Synthetic construct
EIVLTQSPGTLSLSPGERATLSCRASQSVSRSYLAWYQQKPGQAPRLLIIGASTRATGIPDRFSGSGSGTDFTLTISRLEPEDFAVYYCQQGQVIPPTFGQGTKVEIKGGGGSGGGGSGGGGSEVQLLESGGGLVQPGGSLRLSCAASGFTFSSHAMSWVRQAPGKGLEWVSAIWASGEQYYADSVKGRFTISRDNSKNTLYLQMNSLRAEDTAVYYCAKGWLGNFDYWGQGTLVTVSS

SEQ ID NO: 323 - protein, 462 aa, Artificial Sequence
  Synthetic construct
EIVLTQSPGTLSLSPGERATLSCRASQSVSRSYLAWYQQKPGQAPRLLIIGASTRATGIPDRFSGSGSGTDFTLTISRLEPEDFAVYYCQQGQVIPPTFGQGTKVEIKGGGGSGGGGSGGGGSEVQLLESGGGLVQPGGSLRLSCAASGFTFSSHAMSWVRQAPGKGLEWVSAIWASGEQYYADSVKGRFTISRDNSKNTLYLQMNSLRAEDTAVYYCAKGWLGNFDYWGQGTLVTVSSTTTPAPRPPTPAPTIASQPLSLRPEACRPAAGGAVHTRGLDFACDIYIWAPLAGTCGVLLLSLVITLYCKRGRKKLLYIFKQPFMRPVQTTQEEDGCSCRFPEEEEGGCELRVKFSRSADAPAYQQGQNQLYNELNLGRREEYDVLDKRRGRDPEMGGKPRRKNPQEGLYNELQKDKMAEAYSEIGMKGERRRGKGHDGLYQGLSTATKDTYDALHMQALPPR

SEQ ID NO: 324 - protein, 461 aa, Artificial Sequence
  Synthetic construct
EIVLTQSPGTLSLSPGERATLSCRASQSVSRSYLAWYQQKPGQAPRLLIIGASTRATGIPDRFSGSGSGTDFTLTISRLEPEDFAVYYCQQGQVIPPTFGQGTKVEIKGGGGSGGGGSGGGGSEVQLLESGGGLVQPGGSLRLSCAASGFTFSSHAMSWVRQAPGKGLEWVSAIWASGEQYYADSVKGRFTISRDNSKNTLYLQMNSLRAEDTAVYYCAKGWLGNFDYWGQGTLVTVSSAAAIEVMYPPPYLDNEKSNGTIIHVKGKHLCPSPLFPGPSKPFWVLVVVGGVLACYSLLVTVAFIIFWVRSKRSRLLHSDYMNMTPRRPGPTRKHYQPYAPPRDFAAYRSRVKFSRSADAPAYQQGQNQLYNELNLGRREEYDVLDKRRGRDPEMGGKPRRKNPQEGLYNELQKDKMAEAYSEIGMKGERRRGKGHDGLYQGLSTATKDTYDALHMQALPPR

SEQ ID NO: 325 - protein, 251 aa, Artificial Sequence
  Synthetic construct
QAVLTQPSSLSASPGASASLTCTLPSGINVGTYRIFWFQQKPGSPPQYLLSYKSDSDNHQGSGVPSRFSGSKDASANAGILLISGLQSEDEADYYCMIWHSSAWVFGGGTKLTVLGGGGSGGGGSGGGGSQVQLQQSGPGLVKPSQTLSLTCAISGDSVSSNSVTWNWIRQSPSRGLEWLGRTYYRSKWYNDYAVSVKGRIYINPDTSKNQFYLQLKSVTPEDAAVYYCARDSSILYGDYWGQGTLVTVSS

SEQ ID NO: 326 - protein, 474 aa, Artificial Sequence
  Synthetic construct
QAVLTQPSSLSASPGASASLTCTLPSGINVGTYRIFWFQQKPGSPPQYLLSYKSDSDNHQGSGVPSRFSGSKDASANAGILLISGLQSEDEADYYCMIWHSSAWVFGGGTKLTVLGGGGSGGGGSGGGGSQVQLQQSGPGLVKPSQTLSLTCAISGDSVSSNSVTWNWIRQSPSRGLEWLGRTYYRSKWYNDYAVSVKGRIYINPDTSKNQFYLQLKSVTPEDAAVYYCARDSSILYGDYWGQGTLVTVSSTTTPAPRPPTPAPTIASQPLSLRPEACRPAAGGAVHTRGLDFACDIYIWAPLAGTCGVLLLSLVITLYCKRGRKKLLYIFKQPFMRPVQTTQEEDGCSCRFPEEEEGGCELRVKFSRSADAPAYQQGQNQLYNELNLGRREEYDVLDKRRGRDPEMGGKPRRKNPQEGLYNELQKDKMAEAYSEIGMKGERRRGKGHDGLYQGLSTATKDTYDALHMQALPPR

SEQ ID NO: 327 - protein, 473 aa, Artificial Sequence
  Synthetic construct
QAVLTQPSSLSASPGASASLTCTLPSGINVGTYRIFWFQQKPGSPPQYLLSYKSDSDNHQGSGVPSRFSGSKDASANAGILLISGLQSEDEADYYCMIWHSSAWVFGGGTKLTVLGGGGSGGGGSGGGGSQVQLQQSGPGLVKPSQTLSLTCAISGDSVSSNSVTWNWIRQSPSRGLEWLGRTYYRSKWYNDYAVSVKGRIYINPDTSKNQFYLQLKSVTPEDAAVYYCARDSSILYGDYWGQGTLVTVSSAAAIEVMYPPPYLDNEKSNGTIIHVKGKHLCPSPLFPGPSKPFWVLVVVGGVLACYSLLVTVAFIIFWVRSKRSRLLHSDYMNMTPRRPGPTRKHYQPYAPPRDFAAYRSRVKFSRSADAPAYQQGQNQLYNELNLGRREEYDVLDKRRGRDPEMGGKPRRKNPQEGLYNELQKDKMAEAYSEIGMKGERRRGKGHDGLYQGLSTATKDTYDALHMQALPPR

SEQ ID NO: 328 - protein, 252 aa, Artificial Sequence
  Synthetic construct
DIVMSQSPSSLAVSVGEKVTMSCKSSQSLLYSRNQKNYLAWFQQKPGQSPKLLIFWASTRESGVPDRFTGSGFGTDFNLTISSVQAEDLAVYDCQQYFSYPLTFGAGTKLELKGGGGSGGGGSGGGGSQVQLQQSGPELVKPGASVKMSCKTSRYTFTEYTIHWVRQSHGKSLEWIGGINPNNGIPNYNQKFKGRATLTVGKSSSTAYMELRSLTSEDSAVYFCARRRIAYGYDEGHAMDYWGQGTSVTVSS

SEQ ID NO: 329 - protein, 475 aa, Artificial Sequence
  Synthetic construct
DIVMSQSPSSLAVSVGEKVTMSCKSSQSLLYSRNQKNYLAWFQQKPGQSPKLLIFWASTRESGVPDRFTGSGFGTDFNLTISSVQAEDLAVYDCQQYFSYPLTFGAGTKLELKGGGGSGGGGSGGGGSQVQLQQSGPELVKPGASVKMSCKTSRYTFTEYTIHWVRQSHGKSLEWIGGINPNNGIPNYNQKFKGRATLTVGKSSSTAYMELRSLTSEDSAVYFCARRRIAYGYDEGHAMDYWGQGTSVTVSSTTTPAPRPPTPAPTIASQPLSLRPEACRPAAGGAVHTRGLDFACDIYIWAPLAGTCGVLLLSLVITLYCKRGRKKLLYIFKQPFMRPVQTTQEEDGCSCRFPEEEEGGCELRVKFSRSADAPAYQQGQNQLYNELNLGRREEYDVLDKRRGRDPEMGGKPRRKNPQEGLYNELQKDKMAEAYSEIGMKGERRRGKGHDGLYQGLSTATKDTYDALHMQALPPR

SEQ ID NO: 330 - protein, 474 aa, Artificial Sequence
  Synthetic construct
DIVMSQSPSSLAVSVGEKVTMSCKSSQSLLYSRNQKNYLAWFQQKPGQSPKLLIFWASTRESGVPDRFTGSGFGTDFNLTISSVQAEDLAVYDCQQYFSYPLTFGAGTKLELKGGGGSGGGGSGGGGSQVQLQQSGPELVKPGASVKMSCKTSRYTFTEYTIHWVRQSHGKSLEWIGGINPNNGIPNYNQKFKGRATLTVGKSSSTAYMELRSLTSEDSAVYFCARRRIAYGYDEGHAMDYWGQGTSVTVSSAAAIEVMYPPPYLDNEKSNGTIIHVKGKHLCPSPLFPGPSKPFWVLVVVGGVLACYSLLVTVAFIIFWVRSKRSRLLHSDYMNMTPRRPGPTRKHYQPYAPPRDFAAYRSRVKFSRSADAPAYQQGQNQLYNELNLGRREEYDVLDKRRGRDPEMGGKPRRKNPQEGLYNELQKDKMAEAYSEIGMKGERRRGKGHDGLYQGLSTATKDTYDALHMQALPPR

SEQ ID NO: 331 - protein, 247 aa, Artificial Sequence
  Synthetic construct
DIQMTQSPSSLSASVGDRVTITCRASKSVSTSAYSYMHWYQQKPGKAPKLLIYLASNLESGVPSRFSGSGSGTDFTLTISSLQPEDFATYYCQHSRELPYTFGQGTKLEIKRGGGGSGGGGSGGGGSQVQLVQSGAEVKKPGASVKVSCKASGYTFTENIIHWVRQAPGQGLEWMGWFHPGSGSIKYNEKFKDRVTMTADTSTSTVYMELSSLRSEDTAVYYCARHGGTGRGAMDYWGQGTLVTVSS

SEQ ID NO: 332 - protein, 470 aa, Artificial Sequence
  Synthetic construct
DIQMTQSPSSLSASVGDRVTITCRASKSVSTSAYSYMHWYQQKPGKAPKLLIYLASNLESGVPSRFSGSGSGTDFTLTISSLQPEDFATYYCQHSRELPYTFGQGTKLEIKRGGGGSGGGGSGGGGSQVQLVQSGAEVKKPGASVKVSCKASGYTFTENIIHWVRQAPGQGLEWMGWFHPGSGSIKYNEKFKDRVTMTADTSTSTVYMELSSLRSEDTAVYYCARHGGTGRGAMDYWGQGTLVTVSSTTTPAPRPPTPAPTIASQPLSLRPEACRPAAGGAVHTRGLDFACDIYIWAPLAGTCGVLLLSLVITLYCKRGRKKLLYIFKQPFMRPVQTTQEEDGCSCRFPEEEEGGCELRVKFSRSADAPAYQQGQNQLYNELNLGRREEYDVLDKRRGRDPEMGGKPRRKNPQEGLYNELQKDKMAEAYSEIGMKGERRRGKGHDGLYQGLSTATKDTYDALHMQALPPR

SEQ ID NO: 333 - protein, 469 aa, Artificial Sequence
  Synthetic construct
DIQMTQSPSSLSASVGDRVTITCRASKSVSTSAYSYMHWYQQKPGKAPKLLIYLASNLESGVPSRFSGSGSGTDFTLTISSLQPEDFATYYCQHSRELPYTFGQGTKLEIKRGGGGSGGGGSGGGGSQVQLVQSGAEVKKPGASVKVSCKASGYTFTENIIHWVRQAPGQGLEWMGWFHPGSGSIKYNEKFKDRVTMTADTSTSTVYMELSSLRSEDTAVYYCARHGGTGRGAMDYWGQGTLVTVSSAAAIEVMYPPPYLDNEKSNGTIIHVKGKHLCPSPLFPGPSKPFWVLVVVGGVLACYSLLVTVAFIIFWVRSKRSRLLHSDYMNMTPRRPGPTRKHYQPYAPPRDFAAYRSRVKFSRSADAPAYQQGQNQLYNELNLGRREEYDVLDKRRGRDPEMGGKPRRKNPQEGLYNELQKDKMAEAYSEIGMKGERRRGKGHDGLYQGLSTATKDTYDALHMQALPPR

SEQ ID NO: 334 - protein, 246 aa, Artificial Sequence
  Synthetic construct
DIQMTQSPSSLSASTGDRVTITCRASQDISSYLAWYQQAPGKAPHLLMSGATTLQTGVPSRFSGSGSGTDFTLTISSLQAEDVAVYYCQQYYRTPFTFGQGTKLEIKGGGGSGGGGSGGGGSQVQLQQSGAEVKKPGSSVKVSCKASGGTFSTHTINWVRQAPGQGLEWMGGIAPMFGTANYAQKFQGRVTITADKSTSTAYMEMSSLRSDDTAVYYCARRRIAYGYDEGHAMDYWGQGTLVTVSS

SEQ ID NO: 335 - protein, 469 aa, Artificial Sequence
  Synthetic construct
DIQMTQSPSSLSASTGDRVTITCRASQDISSYLAWYQQAPGKAPHLLMSGATTLQTGVPSRFSGSGSGTDFTLTISSLQAEDVAVYYCQQYYRTPFTFGQGTKLEIKGGGGSGGGGSGGGGSQVQLQQSGAEVKKPGSSVKVSCKASGGTFSTHTINWVRQAPGQGLEWMGGIAPMFGTANYAQKFQGRVTITADKSTSTAYMEMSSLRSDDTAVYYCARRRIAYGYDEGHAMDYWGQGTLVTVSSTTTPAPRPPTPAPTIASQPLSLRPEACRPAAGGAVHTRGLDFACDIYIWAPLAGTCGVLLLSLVITLYCKRGRKKLLYIFKQPFMRPVQTTQEEDGCSCRFPEEEEGGCELRVKFSRSADAPAYQQGQNQLYNELNLGRREEYDVLDKRRGRDPEMGGKPRRKNPQEGLYNELQKDKMAEAYSEIGMKGERRRGKGHDGLYQGLSTATKDTYDALHMQALPPR

SEQ ID NO: 336 - protein, 468 aa, Artificial Sequence
  Synthetic construct
DIQMTQSPSSLSASTGDRVTITCRASQDISSYLAWYQQAPGKAPHLLMSGATTLQTGVPSRFSGSGSGTDFTLTISSLQAEDVAVYYCQQYYRTPFTFGQGTKLEIKGGGGSGGGGSGGGGSQVQLQQSGAEVKKPGSSVKVSCKASGGTFSTHTINWVRQAPGQGLEWMGGIAPMFGTANYAQKFQGRVTITADKSTSTAYMEMSSLRSDDTAVYYCARRRIAYGYDEGHAMDYWGQGTLVTVSSAAAIEVMYPPPYLDNEKSNGTIIHVKGKHLCPSPLFPGPSKPFWVLVVVGGVLACYSLLVTVAFIIFWVRSKRSRLLHSDYMNMTPRRPGPTRKHYQPYAPPRDFAAYRSRVKFSRSADAPAYQQGQNQLYNELNLGRREEYDVLDKRRGRDPEMGGKPRRKNPQEGLYNELQKDKMAEAYSEIGMKGERRRGKGHDGLYQGLSTATKDTYDALHMQALPPR

SEQ ID NO: 337 - protein, 429 aa, Homo sapiens
MLPRLLLLICAPLCEPAELFLIASPSHPTEGSPVTLTCKMPFLQSSDAQFQFCFFRDTRALGPGWSSSPKLQIAAMWKEDTGSYWCEAQTMASKVLRSRRSQINVHRVPVADVSLETQPPGGQVMEGDRLVLICSVAMGTGDITFLWYKGAVGLNLQSKTQRSLTAEYEIPSVRESDAEQYYCVAENGYGPSPSGLVSITVRIPVSRPILMLRAPRAQAAVEDVLELHCEALRGSPPILYWFYHEDITLGSRSAPSGGGASFNLSLTEEHSGNYSCEANNGLGAQRSEAVTLNFTVPTGARSNHLTSGVIEGLLSTLGPATVALLFCYGLKRKIGRRSARDPLRSLPSPLPQEFTYLNSPTPGQLQPIYENVNVVSGDEVYSLAYYNQPEQESVAAETLGTHMEDKVSLDIYSRLRKANITDVDYEDAM

SEQ ID NO: 338 - protein, 15 aa, Artificial Sequence
  Synthetic construct
GGGGSGGGGSGGGGS

SEQ ID NO: 339 - protein, 691 aa, Artificial Sequence
  Synthetic construct
DVQMTQSPSSLSASVGDRVTITCRASQSISDYLSWYQQRPGKAPNLLIYAASNLKTGVPSRFSGSGSGTDFTLTISTLQPEDFATYYCQQSYRSPWTFGQGTKVEIKGGGGSGGGGSGGGGSEVQLVESGGGLVKPGGSLRLSCAASGFTYSNAWMSWVRQAPGKGLEWVGRIKSKTDGGTTDYAAPVQGRFTISRDDSKNTLYLQMNSLKTEDTAVYYCTIFGVVSFDYWGQGTLVTVSSAAAESKYGPPCPPCPAPPVAGPSVFLFPPKPKDTLMISRTPEVTCVVVDVSQEDPEVQFNWYVDGVEVHNAKTKPREEQFQSTYRVVSVLTVLHQDWLNGKEYKCKVSNKGLPSSIEKTISKAKGQPREPQVYTLPPSQEEMTKNQVSLTCLVKGFYPSDIAVEWESNGQPENNYKTTPPVLDSDGSFFLYSRLTVDKSRWQEGNVFSCSVMHEALHNHYTQKSLSLSLGKIEVMYPPPYLDNEKSNGTIIHVKGKHLCPSPLFPGPSKPFWVLVVVGGVLACYSLLVTVAFIIFWVRSKRSRLLHSDYMNMTPRRPGPTRKHYQPYAPPRDFAAYRSRVKFSRSADAPAYQQGQNQLYNELNLGRREEYDVLDKRRGRDPEMGGKPRRKNPQEGLYNELQKDKMAEAYSEIGMKGERRRGKGHDGLYQGLSTATKDTYDALHMQALPPR

1. An isolated nucleic acid encoding a chimeric antigen receptor (CAR), wherein the CAR comprises an extracellular domain, a transmembrane domain, and an intracellular domain, wherein the extracellular domain binds an antigen of a solid tumor and wherein the antigen comprises FCR1, MSLN, GPC-3, ALPP, CD70, CLDN6, ROR1, CD205, ACPP, ADAM12, or CLDN18.2, wherein the CAR comprises an amino acid sequence selected from the group consisting of SEQ ID NOs: 34, 35, 256, 257, 259, 260, 42, 43, 23, 24, 2, 3, 49, 50, 14, 12, 16, 17, 55, 56, 8, 339, 46, and 47.

2-13. (canceled)

14. The isolated nucleic acid of claim 1, wherein the intracellular domain comprises a co-stimulatory signaling region comprising an intracellular signaling domain of CD27, CD28, 4-1BB, OX40, CD30, CD40, PD-1, ICOS, lymphocyte function-associated antigen-1 (LFA-1), CD2, CD7, LIGHT, NKG2C, B7-H3, or any combination thereof.

15. The isolated nucleic acid of claim 1, wherein the intracellular domain comprises a CD3 zeta signaling domain.

16. A vector comprising the isolated nucleic acid of claim 1.

17. A CAR encoded by the isolated nucleic acid or vector of claim 1.

18. A modified cell comprising the isolated nucleic acid of claim 1, wherein the modified cell comprises a T cell.

19. The modified cell of claim 30, wherein the modified cell comprises a dominant negative form of a receptor associated with an immune checkpoint inhibitor, and optionally wherein the immune checkpoint inhibitor is selected from the group consisting of programmed death 1 (PD-1), cytotoxic T lymphocyte antigen-4 (CTLA-4), B- and T-lymphocyte attenuator (BTLA), T cell immunoglobulin mucin-3 (TIM-3), lymphocyte-activation protein 3 (LAG-3), T cell immunoreceptor with Ig and ITIM domains (TIGIT), leukocyte-associated immunoglobulin-like receptor 1 (LAIRD, natural killer cell receptor 2B4 (2B4), and CD 160.

20. The modified cell of claim 19, wherein the immune checkpoint inhibitor is modified PD-1, and optionally wherein the modified PD-1 lacks a functional PD-1 intracellular domain for PD-1 signal transduction; interferes with a pathway between PD-1 of a human T cell of the human cells and PD-L1 of a certain cell; comprises a PD-1 extracellular domain or a PD-1 transmembrane domain, or a combination thereof; comprises an intracellular domain comprising a substitution or deletion as compared to a wild-type PD-1 intracellular domain; or comprises a soluble receptor comprising a PD-1 extracellular domain that binds PD-L1 of a certain cell.

21. The modified cell of claim 30, wherein the modified cell is engineered to express and secrete a therapeutic agent, and optionally wherein the therapeutic agent is a cytokine, a small protein, or an agent regulated by Hif1a, NFAT, FOXP3, and/or NFkB.

22. The modified cell of claim 30, wherein the modified cell is a T cell derived from a healthy donor or a subject having cancer,

23. A composition comprising the modified cells of claim 30, wherein the modified cells comprise T cells.

24. (canceled)

25. A method of eliciting and/or enhancing T cell response in a subject having a solid tumor or treating a solid tumor in a subject, the method comprising administering an effective amount of T cell comprising the modified cell of claim 30.

26. The method of claim 25, wherein the tumor is associated with colorectal cancer, breast cancer, ovarian cancer, pancreatic cancer, lung cancer, liver cancer, endometrial cancer, kidney cancer, bladder cancer, or prostate cancer.

27-28. (canceled)

29. A modified cell comprising the vector of claim 16, wherein the modified cell comprises a T cell.

30. A modified cell comprising the CAR of claim 17, wherein the modified cell comprises a T cell.
